United States Patent Application Publication US 2022/0211063 A1 - sequence listing, part 42

SEQ ID NO: 108 - DNA, 1380155 bp, Penicillium roqueforti
  misc_feature (15000)..(15662): n is a, c, g, or t
  misc_feature (17771)..(18557): n is a, c, g, or t
  misc_feature (101023)..(101241): n is a, c, g, or t
  misc_feature (169631)..(170396): n is a, c, g, or t
  misc_feature (215500)..(215913): n is a, c, g, or t
  misc_feature (219210)..(219525): n is a, c, g, or t
  misc_feature (223203)..(225039): n is a, c, g, or t
  misc_feature (231063)..(231291): n is a, c, g, or t
  misc_feature (337641)..(337773): n is a, c, g, or t
  misc_feature (338244)..(338772): n is a, c, g, or t
  misc_feature (339742)..(339933): n is a, c, g, or t
  misc_feature (370234)..(370243): n is a, c, g, or t
  misc_feature (453257)..(453275): n is a, c, g, or t
  misc_feature (463024)..(463044): n is a, c, g, or t
  misc_feature (468106)..(471999): n is a, c, g, or t
  misc_feature (492071)..(492841): n is a, c, g, or t
  misc_feature (498894)..(503490): n is a, c, g, or t
  misc_feature (507197)..(510434): n is a, c, g, or t
  misc_feature (527773)..(529964): n is a, c, g, or t
  misc_feature (549736)..(549944): n is a, c, g, or t
  misc_feature (582303)..(583195): n is a, c, g, or t
  misc_feature (772639)..(773169): n is a, c, g, or t
  misc_feature (797272)..(797478): n is a, c, g, or t
  misc_feature (799341)..(800440): n is a, c, g, or t
  misc_feature (833207)..(833354): n is a, c, g, or t
  misc_feature (925613)..(925783): n is a, c, g, or t
  misc_feature (993425)..(993617): n is a, c, g, or t
  misc_feature (1022223)..(1022255): n is a, c, g, or t
  misc_feature (1051522)..(1051598): n is a, c, g, or t
  misc_feature (1188564)..(1189202): n is a, c, g, or t
  misc_feature (1191284)..(1191700): n is a, c, g, or t
  misc_feature (1224646)..(1225528): n is a, c, g, or t
  misc_feature (1229062)..(1229413): n is a, c, g, or t
  misc_feature (1328346)..(1328746): n is a, c, g, or t
  misc_feature (1354790)..(1354942): n is a, c, g, or t
  misc_feature (1376240)..(1377677): n is a, c, g, or t
tattttagcgttgaaattgaaattgaaatgatatttttaattttcaagtgattttaacagccctaactttagcacttgaatttgagcccccttgtgatggggctagttcattcatttccattatctcagatttgattgaggctaactatgccactataccttattgttgtcggccccgataggaggattgattggaactcgctacgaacacgaagaaaccccttgaaaattgaaaagttcgcggcgctataattgattctaacctaattgaaataatgccatccacataaatctacaagctccataagccgagctaacctaaccgagttctttggctatggctagatcgcttgctagaacgggctaaattggcgttgactagggaaatgaccacggcccagatcggaaggacggtcaaaaactgagaagtctcgtcattttgtctaaaatcaaaggtcttcctcttggttaccgttggaagttctgccaagagtcttgacacaatgcatcttgggaaagggctctggctagttggtcaaattagccttcttgttcaagcttctcataatcatcatggccaccaccaccaccaccatgcgagatcccatgacctgcacatacccgagagtgcttctcatgtgtctggatcagttcatgcagtgacttcaagtggtccatatgcagctggggaaacctctgacgcagctgatgccgttgcacgggctctcaaagtcttgaaacagagaaacaagcttcgccttgagaatgtccagcacaacaactacaagttaagagctttctctgacaagagctctgatcccaattctcgtcccctggactacagcccgaaggctgcagaaacctcgacggattccaacaaccagaccatccgcagatcatccgacacaaaagagaattatggatactcaattcccccggaactcagagaggctgctcgaatccttgccgagtcaacacccccatctccatcgacaggaaaccatagtgctgtggcggccttgatgcgcgaaaagtatcgtagcgggataagcgacacctccattcctctgcagagctatagaacctacgatggtttatctgatattgtcatgcaaaataaccaatcagtaccttctggaaattctattcctgaggaaggactcggaaagcgagcaagctcaagttggtggatggctacaatggtccaacgtggtgccaatccgtacgcaccatctggttacaaagtatggttgctgtttatcttataacccatcaacataccaaactaacgttatcgaaggtttggagaaatgtcaaagattatggagctaagggtaaagaaaaccgcattctttaacttattctgatttctaattgaaaagtttaggagatggcgttaccgacgacactggttagtccaaaccttttcctttttttccccggctttttcctttcttgggtccctttgctggagcccaggaagttcagacaggaggttaattcattatttctagcggctatcaaccttgctatctcagatgggggccgttgtggtgccagctgcggttcaagcacgatataccctgccgtggtctacttcccgcctggagactacctcgtcagcagtcccatcattcagtattttaacacacagatcctcggtgatgtatgactccccacctgggcaggtgattctcgttcctaggttggaacttaagaaatccctccgttgattatctgcatgtgggctaacctctctgtcagcccatcgacctacccacgattctcggtgcatcaagctttgttggtcttggtgtcattacctctgatgtttacgtcggtgatcaagaagaatggtacattaatacgaacaatttcctccgcagcgttcgcaacttcaagattgatatcacccggacggaccaatcagcctatgtctgcgctattcattggcaagtcgctcagggaacgtctcttgaaaatatctacttctacatgacccaagatgcgcagaccactcagcagggtatttatatggagaacggaagtggcgggttcatggctgacttgacctttgttggtggcaactttgggtaagaataactaaaatgccttgagttcgcctttcatactgatacatgcatttcaatagtgcttaccttggcaaccagcaattcacaaccagtcacttggtgtttgtgaattgcaacaccgcagttcaaatccagtgggactgggcctggacaatgcaggatgttattgttgaaagctgtactaccggtattttgattgtcggaggagtaagtgtcaagataagctgactttgatgaaaaagcaaagcaatgctaacaaggtcctataggcaggtggtccttacagtacagggcagggcgttggctcttttgttttagttgactctctgattgccaacaccgctactggtatcgtcaccacactctacaatgagaactcaactgctttgcttttgcaaaacgttgggttctataacacgcagaccgctattttggataacaacgtgaacaaggctttgatccctggaggcgaccagaccattcttgattcatggggcttcggaatggtcaatgacccagacagtgcacgttttgtttctggcgcgaatttgctcgctatgaacaggtcctcttcgctcgttggtagcaccctttacaataccaagcctaatttcttcacccgtcgtcgtccgaaatatgacgatttggggaattctcaggtgctggacgtcaaggagctcggtgctaagggcgatggcattcacgacgatacgaacgtgctaaactctatcctagccagagctgctaacatgtcgtctattgtatacttaccgcatggtgtttatgttatcaaagacacgctcaacgtccccaaaaactctcgcatcctgggtcaagcatggtctcaaatcatggccacaggcgataaatttgaagatgtgaaaaatccacgtgtcgccgtgaaagttggaaaaaagggtgatgaaggcattgtcgagattcaagatctccttttcaccgtatccgggcccacggcaggtgctgtactagtggagtggaacatacgcgagtcgacacaaggctccgctggactatggggtaaagtctcctagatctattggcgaatctgttacttgatcttcctactgacgtttacttccttacgacagattctcatttccgagttggaggggctaaaggctccaatctacaagcctcagattgcccaaagaacagtggctcggttaataaagactgcattgcagcgtcgctgatgcttagattgactcacagctcctcggcatatctggagaatgtctgggtctggactgccgaccatgatcttgatattgcgtctcaagatcaactggatatttacgcagctcgtggcattcttattgaaagccagggaccaacatggctttatggaaccgcctcggagcaccaagtcttttaccagtatgagctatatcaagctgaaaatattgtcatgggaatgatacaaaccgagtctccctacttccagccattgcctgctgcacccttgccatttacgcctggtctattccccggagaccctgatttcacaaactgcacctcatcctccaagacttgtggcttctcatggagtatgcggattttggactcttcaaccgtttatctccttggcgcaggtaagttgatggcgagaacacttggccattacttcaggctaacgattcaacaggattctacagttggttctcggactattcgcagaaatgtgtcgatgaagagctttgccaagaccgtgggttccaaatcgaggagagctatgatacatggatctacaatttggtcaccaaggcaatttccgagatggtgagcccgacgggtgaaaccccaacttatgctaaggacaacaagaatggatttttatcctctttacttgcttggatccgaggctcgaaggtggtgattggtggtcgcgacctcccaggcttttatgtctgggacgctaatactgacgcggatttgatgactggcctgcctgattcctgcaaaacctcactcacccaattagtcggatgtgattcgtacgcgcggctgtttttggctgagagttatcggggatcattgggtaatgacactctcacagaatcagtctgtgatgaaagttgcggcgtctcattgaagcgctggtttgataatgttgcttctgactgcaagggatacaatgtttctgattccgctgccaccaaatatggtggacagatctggtctggctggaacgaaacctgtctcaaagataccagaacgggagaatactgcaatggtaagggtatctcgtgctcgttttctaagtcgctagtgctaatgatggcagatttgatatccgaatatccagccgttgacttcctagatgacatgccggaatcggaaatctgctcattctgctttgtcgagaggctgggaattatgcagcggtcgtcatactccttctatgatgaagggttccaggatcagttgggtaccgtcaatgctaaatgtggactgtctgttccgacagccaagcccccatcgctagatgcaccccctgagtttctacctgacccaatctgcatctcgaatcaaacgtatcagacagtctccggtgacacatgtgactctatcgctttgagatacaatgtttcatctgcttccctggtcatggcgaacaatcgccagctcatggtctgcaacgacttgactgcagagatggatctttgcataccaagcagctgtgcatccacatacaccctcaagagcaacgacacctgtacatccatcgaatcgtcgggccttcgccagcgtggtgatgtgaggaaatacaactcatgggttgaatgggactgctccaatcttcaaacatcaactgacttctggggccacataatttgcctcggcgttcaaggaggtacatacactgctactgcctcgattccgggagttactctagcccccgaagagagcacaggatatacaaattcacgcgtcgcgcccccggccaatgctactgccgctgaaggtacaaccttgaagtgtggcaagtggcgcgttgctgtgaagggagagacttgtgcacagatctgcctgcaagaatcaatcacctcaagtctatttgtcggagtgaacccgtctctcgcaagttcgaattgttccgacggtttaatcgttggaaatgcatactgtgtcggccctaatccgggatggtcgttctctaattcgactacttccttaagcacccaaggaaggactccagggagcagctcaatgccagtttccgcagctattctttgagatctactcccgcgttcagactttttctgagtaatagctcgtgacaaatccatcgataatcctaggtagacctccctactatagagactagatgtgattttcaggcatgattgtgcccaagtagccttcggggaaactgatagtcatttggtattcgaggatatgccactgcctccaaacaaagatatatgagacccagatacagctgcaatttgaatgttcaaaatatataatgatacttctaagtaagtgcacacttggaggtggaatcggaacagcggcatcgacggtctcgatgattttcgttatgtagataaaagacaaaaaggctaccctctcccacacccttgctgcgctgatcgcaccgggcgtctccgaccaaagtttttaggaatgaaatttccatcttgatcctgcgctgtcccatcgccctcatcatagacaggaatccagccatccggcaccttcggacatagctgttccatttgatcgaattgaagattcaagtaaagaggccacagtgcgcacactagcgacctcataaacccacggtataaaggcgaatcatacctctttgcggtatcataccgtccatcaactaccccaacgaaacccccgtgagggtcgtctgtcttaacaagagagttaagtgatcgctcatcaatcatcagacagacagcaaagcgagaatcatcacaatgttcctcctgcttaattttgcgcagatactgggcaaaatgagcacgtacttgctcaatactagcaccgtcccaacgccctgggtcagagatgatgacatccttatgagactcttctatcaactgctcggggcggggatcattcccatagcgtgtctcatggtgtaattcacccttcatccattcgtgcatcacgcggatcagcttttccttggcgattggccataattcctcagactcaggtgtgtagactgttcgatagataatatacccccatggaaaatgatatggaaattgtttagtcaggaatcgatgggtgatgcgatcagtcgtgcttctgtaccacggctctttctcccaattttcggaggcctctttagtgaaatcgggatgatgccagcgttttggccagaccgggtgatgatagtgtttgtcactatccagttcctcgacctggtcgtttggatcattgaacggggcagattcggatgaggagggcggggaattcatctgtggaaagtgatacaccacataagcaaaaagaaggagaagaaacaggtagtaaattatagagagtaccatttcgataggaacaggaccatgagatgctcaggcgcgggtgttggagagaaaagttgaatgcctcaagaaaacaagaagagaagaagctaagaaacctacagggctgtgagagggtttaaatagttcaggcctacttcccatcggccaatcatatccagacttcgtttagcgcggatccatccttggaacgacgactcttggcatctgtttgatgggtttgcatgcttccatagccccgtgcagtaaatagccctcaaatccagtcttcatcatagtgctcctcaacttgcatcattcctgcgtgaaataccagtcaattttcgtatcctcgctcgaactagactgcctaccaccctatcccatggggttcattgatctgagcccccaagtcataaaaagatcccaaattggccaattagattggaaaggtatacggtatgcaggtgtaaggcctgtcaaccaggtaagatacaatggtccaatgagggagagatctggaacgatatgtatttgtcttctaggtgcaagactaattcttgtcagatctgtcctggggtctgaggacccttagttatttatgacggaactatggtggggtaaggaaacgatccgactgcgggacgatgccgcaaacggctcggaccaccagtctttcaccgacatgtggaatggtatcactgctgacatgtcgttccagtattgtcaggggtattatccatgacagacgctcacttatcctctaagtgcaagaatagtacaaaatcctggtcagattatactttttcttggtaaatcctatgcactctactctatagtgtagccattattttccatgacttttattaccaggtcgttgccgttgaatcttgttatcttgcttcttggagtagttgaacccccggattgggagttgaacccccggattgggccggggaaaacctcgggccgagatctggacttatagactggaacatgcacaaaaaacagacattaatcagcagggttatgaatgccaatattgtagttgtgtgcatagaaatgggcttgtttgggctttgctgaagtctagtgaccatcactcaacttcaccgcctggccatataccacaatacacacatcaacaccctcgtccataatatcgtcagcgctcatcaacgaccatcaacgcctggccaacacatccactccgcaccaaaagactcaccattttgttcgctccaccccctgatggcagatacattctactgcggcgggaagactagccgaccgcaaaccatgaagacaggagggttgggaatacggcactcgataacgaaggttggatcttgaatttacgattctggtgattgatttgcatctatctagggctgatttcattcctccaatgatgatccttcgaaatacgaaatagatcataaagatgttgcgcagatctttgcttcttcgagtactgttgaatactcgaatactggtccctagcaccgcgaagaggtgcctgcacatcgctagaggccttgttaacgcagcaatcccctgcggggttccttgttctcgcagcgctctcctgcggatgtccttggttgcgcagcgctcccctgcgaagattcttgttttcgtagcgctctcctgcggaattccttgttgacgcagcacctccctgcgaggattgttgttgacgcagacctatcctgcgaagcaccttcttacatcgctgggctcgtggcagcgacagccgtggccatggagactctcaagcccgcaggcaagagggacaccatgacacatcggagtgtgaggaccgaagtcctgattttttttggctgggaatccggctccttatataatttttcggctacgtttctaccaaggaaccagttgcgcagatggtagcgagaaccactgtctcgttgatgggcgttgaagcgagttaaacgacgttgcaatggtctttggagactttgtggcctacagagtcaagtttcaacctggattcattcctttcaacaacctgcgttaagtgtggctaaccacttcatcaactgttgaaaagacagtgataccgcaagaaaatacattgcaattaaattgctcaacgcggtggcactctacatctgcccgttctagccacgtcgctcgtctctttcatgggggttgaagtgcttcaacagaccccgcaacaatgggttggagactgtggcagacagggacatccgattgtaccggctgttggccataggacgtgcctcccattgatcccactagaatcaggtttgtctatctcctagccccgcgctgctttaccggtactttttttctgttgctcttagccaactgatgttgcctttactagagtttttgctacctagcgccttaggcattatgaacatccttatatatccaggatgttagttgtattctttgacggagaatacaaaagtctagaccctgttagaaagcctagaatagaaacccgagtccagttttccaagacaatgaaatgagttatttcagctaccatggccacgagctaggtcctcgtgatcgccatccacatcgtgagattgcaacactactgtcccattgatgaaaccctggacacatgaagcaccggttgtatcaatcaaataccaggcgcgaatttagatagatacagatcccaggaacgacccatgggacagtagatcaaggatattctatttgtggcccagagaagaatttggaaggacttacaagggtctagacacaatccacaaatctagtcttgacgggccgtcagagtacagatagaacaggcctttggtacttaggggtcggtcggggcagataacgtatttggaatatcgtatagacttttagcaatagagatacaatccgccgaaatttcgcagaaggggtaagacttctccccattcccttctcttaatcaattcgttatcttattccaattctaggggaactttagacagttcttagcgtaaatccttaggtcattcaccggaaccccgacctactcagtgagaattgcgacagcttcaacccagaccgctggctccagaaagaatcgggacgaatagatgcctttttaatccatatatgtatataccccctccgactactagtttgtaaagttaactaatgaccatttcactgttatagtggggggctggatacaacgcatatcctaggcgcaatttcgcgcaatttgaaatatccaagcttactaccacttttttctaagactatgacattaagcaagcggatcctaaggaagagtagatatagcacaatcgttttatttacataccgagtcgttggtggagacgatgcaccaggttacccatcgaagcttccccaacctactcgagcattatcgtcatagaggtcaggatttcctggtgtgggaagcggttaagttatccataggccaggtactaaggtcgcgatactccatcgacgaaggagccctcgccgcaattgtttggccggtaggtatagggcgtacaggcggtctccctcctctttctaaaggaaagggtcgctaccattaagaaactaacggctaataattggtaggtcctaaaataaataaagcatctccgtagatagggcagagtactggctaccttaagcgccgacacaatttttctcacagagtccagtatcgtcaaaattggtaagtaaggggcagtctagtttacaaacaccttcgggtagtgatactaacgaggaatatatagcgggggtggagcacagttaccaaatcgacgcgactgagatagacgctgtaaccctgaagctgatagccctggctgacatggtccaaaacttgataacaagaagctctccaggaacaaaatggagccctaaggcccagagtctccccaaggatctgaaccgactgtcggttaataagctactacgagtaagtataatcccacctgtctatcatacaagactgcggctaaccaggcagagtaaattctttgagcaattagggtctagggaggaattaaaaatactagtaaacgtggtaaacaaagatacatgccacaaaattgattttctcggttacacataagaagcgcataatattcacgcgtatatatccgtgcggaaatcccatcgtgtggatgttctttgccgtaaatctaactgtaataggattatctgcgtagagacctctggaatactttctaaggtcactcaaattagtcactggagtaaattccctacaaggtttctttctacttgattttttggggttatagggtattggttaggtcactccccacggcttagcattagtaggcgaaacccttctcttaatccgagtatatatatatatatctctataatagtctccctttacttttctgttcaagaaaccaaacacacacttgccgtttctaacacagtttattcgcggctgatccttctcagaagacttctatctcatcagtagtagcctatcaacgcgtaaaagcacataatggtcgtgatacagccgtgttttcactacaaacaatataagatttcctattataggggttcaacttgggatccacccactcctgcttatcgaggttacgataagataagtaggctcaatcagataagtgggaattcctacagatactcgcatctgatatgcttacaggacataaaaaacaaaacaatatatcagcaagtcagcctaccagaacctctccccaaggtttacagtgccacttcgcgagatatctcctgatatcaagtccaatcgcgttcttccgccggcgagctactattctagttcccatagctttataaagccttcatcgcctcggtgactcccgctctgacacacgtcaattcagtctctagccgactagttcggagcgagctagcttcaagctcagtccaaagccgacgagacttttcctagaaccaatcgcttttgctatacacgtcgtctagccaggcccgagtataaccgagctccacccccagctcgcagttcgcgccttccagttagcggatttttgctataaataacccgtcttcttcctcatacaatcttacatcttcctatgtctttgttgagtgccaggaaaactggcaggtataggaattctcatatcttcccctagatcaccgagtcagaaccctgcaaggtctacggtacaactgcttcaagcgaccggcccaattcttcatatatagcccgaaatagaccgacagatccactactttagctcgactgtaataacaatttcttagattccgtcactaaccaggcgtatctgtcctcaactagtagctggaggcgaacttagctaggagcaatattaaggccaagtcgattatctggattcattagttccccctttccgtaggatatataagacaggtatggatatatacagacagtacctctcgacattactatcttatcgcagcacgcgtttcattacttttaagagctatttctttgccctcccatatatatcaaatatacgagaataaatagccacagtttttataactaactataaaagattctatctccaggtcgttatatctataggattcggttgacagttcgttaaatattatctattaaagtctaccgaactgtaagtcttcaaaaggattaatagataaacgtattagagtagagataaacggattttaacggtaatttctaaagagagcagcccttagtactacagctttaactatatactaatagctaatagcctctagattaaatataaacgatagctcaactattcggtggtcttagactaacgatcagtgatcttatgactaccaaataaggtaaagaacgttaagaaatatagataaggctaaattgtatcagctacatatataagataagatttggctattagtctgcctatataaagcagagggctattaaaggcctacccctatagtcgaagtattacacaaatattaacatatagtttattcttagttaaagcagacccagctatccccttccctatatcgcttaactagtttggaatatctactatttgcctaccaccgaaccaataggtttcagattgatgcaaagccttgtatcctttaggagctcctcgataacttaataatgcccgttggaatcagcgtaccacattaaactcttgcccgacttatctacagcattgaggtctattcgggaatcctctaagatgaccttcacggtgtgtagataagctagcggccgttgacagggcgctttcgccatctttattgttttgagagttgatattcaatcgtttgccctgcttcagtaggagactaactaccttagttctaccacacttcacagtaagccaaagtggggaatcctcccctgggcggactgcattgatttggatatcgtttctctgaagcagtaatttaactatgtcaacattactgtcatgtgcggcgtgaccgagaggtgtccaacggaaagacccgaggacatttagatccaactctggatttttaatggcgtatctgactacgttatacctaaaaaggggaaacaactagtgtggattcgctaagatctaaatggacgagggagagagagagagaggaagagggagcggaactatctaataatctgggtccatataggtgactgccttccggtcacccaacatcccccctatagatcttatatctcctattttaaaaataataatcttaaaatgttataatcgtggtagttataaaaaaccccaaattttcctttaaattaagttatcctaataagctttaagaaagctcggaattactctttaggaagtgcctttataaacctgtctgccgcgttctgctttatattaacccttaggatatttatatatccttaggccacagcgtcctttataaagaactatcggagtacttactatctagtagtagacttacctcccttctttattagtagtaactgtaaattaatattattagtatagataactataggattaggtcttagtaggcttagtaagtctataaccttagtaagctatatagtatcctaggccggctaatcgagtatatactattctactattattatagagttcgctgtgattatctactttttagtagactaagctactaggactcctataaagaactagatatatccttcggttaatttagagtctatttagtctatatataatatatctataaatactataaattatagttcgtctaactttctaaagattagtcctatcttagggttatatctaaggtacttaataacatatcttattaccttaagattagaaaaagttggtattactagtctatattataggtatataacggcgaatctaatatctggtcttatcttaatagtaagctagttgagtatccctactactgtttagtagtattcgaagttctcgttatcgagtaggttagagttaatatcttctaggttagactctctctatcctagtggtagtagtgtttctttcgttcccatagtatctgtaatatatagaatcttttgtatataggcttcttaagatatgataattgtcttagcattataatctctattaagttgtaacgggctagagcccgcacaggatcacgtaataagcacgtgaccttcgccacccctgttttctcctgtttcttcctataagcttcatttcctttccttaagcttttagacaatagcaaacggcttagttagcttgaattctaatctagctctgtcccttcatattctaaaagcttccttttccgtagaagattagaagagtacagaaggatataccgacgaacggcataataaacgagaatgtagaatggtcagaaccgcccgaatgggctaaagtgatgatatagcgattagtctagtctactacctcctaggaggagatcgcatgagtataagaggaaaggattaagaagcttaaagagctagtctagataaacgtgatagcacaagaagaatctaataagaataacgagactaaaaacgaacctacctaggggttatcggaaatgagataaaccatacaaccatggctatacctccccaacccctataagacccctaggtatggaatgcctaagggaatgctgtatgtaatagaggatcaggaaatagagatagtagtatatatagtggtatattaggaactaatagctgcttctctaaagaagcaccatatgaggataatatataggttataggttatatgattaaagggggctgtataggcagtatacacggctcctgcctagcctatagttccctatataccttaataggtataataccttaggtattagccttcttagtactagggtcctaataatatccccctccttannnnnnnnnnnnnnnnnnnnnnnnnnnnnnnnnnnnnnnnnnnnnnnnnnnnnnnnnnnnnnnnnnnnnnnnnnnnnnnnnnnnnnnnnnnnnnnnnnnnnnnnnnnnnnnnnnnnnnnnnnnnnnnnnnnnnnnnnnnnnnnnnnnnnnnnnnnnnnnnnnnnnnnnnnnnnnnnnnnnnnnnnnnnnnnnnnnnnnnnnnnnnnnnnnnnnnnnnnnnnnnnnnnnnnnnnnnnnnnnnnnnnnnnnnnnnnnnnnnnnnnnnnnnnnnnnnnnnnnnnnnnnnnnnnnnnnnnnnnnnnnnnnnnnnnnnnnnnnnnnnnnnnnnnnnnnnnnnnnnnnnnnnnnnnnnnnnnnnnnnnnnnnnnnnnnnnnnnnnnnnnnnnnnnnnnnnnnnnnnnnnnnnnnnnnnnnnnnnnnnnnnnnnnnnnnnnnnnnnnnnnnnnnnnnnnnnnnnnnnnnnnnnnnnnnnnnnnnnnnnnnnnnnnnnnnnnnnnnnnnnnnnnnnnnnnnnnnnnnnnnnnnnnnnnnnnnnnnnnnnnnnnnnnnnnnnnnnnnnnnnnnnnnnnnnnnnnnnnnnnnnnnnnnnnnnnnnnnnnnnnnnnnnnnnnnnnnnnnnnnnnnnnnnnnnnnnnnnnnnnnnnnnnnnnnnnnnnnnnnnnngaacttaggtatctcctatatataagggtatagctaagtagttatttactagtaagagaatatagttaggataaaggggaatactatatatatatatacctaggttacccctaatatcttcttctcttctttaaccccctatcttatttacttagtaaatatacctaatttatatttctattaaatttctattaagataatattattctaattagggtactactattagctagtaaatatagtaaatatatctttagatttagtagtattatattctatatagtatactaagaaaatttaatattatatctatcccttccttatagaaaacggccttatttatatatttatatactaattatatttatagaataataatagtatattattatcctatactatcctcctctaaggaggataaatctctatatctataagtataatattatcttttagtaggctataggtctataattctatctctatacttagaaacccctaagcctattaaagggctattaccttactagtagtactttttctagctataaagctacctagactataagtataagatccttataggttatattaaatatacttactactctttagtaaaatatagttatatccctataagtttaactatattattatagggaggaatttattattaataatagtatagcttctttttaaggtttaaactactacctatactacttttaatatattacctatatatacttatataccctaagtatatattattaagcagaatattaagcacttaatctatatagctaataaagctaaaaaggctactactattatagaagttatagaagttattagggtcctaagaattgtagaaaatataggagaaatctctaaagttaaggaattctttaatactcctactagtattctagaggaaagtatggttcctaatataggtatacctagtaatactttatttatccctaaaaacttagtccctacttcttagggtatcttaggtatagagtctattttactactttattatatttttaatactactttattagtatttaagtctagttaggtatactaaccctacctatacctatatataaattctagtaaatatagggaatatagtactaaattttaatctataattaaagcttcttatattttaagtatatattcttagtccttatcttttttagtatctttactactatagttatcctagccttatagttattaaggaccttagtatccttaactatagactatagttcctagattactttaatattattatagctatactacttaactaaataggacctatttttcttactttaatagaataggatatattcgatcttatattctacttaattattaatcttaattagtttaggaatattattattagttagagtattactataatataattctagtactaatatatagtatattaggtatagtaatttaaaatagagggatagatatagcttatatacttatatatcgaccttcttaaagattagaaatagacctagtattttataatctagtttcttacttagtctacctatttctatattcttactcttaagatatacctaattactaaccttaaataatttatctatataatatttatctatataatactttattaactcttttaccttagtaagtcgctcttttataaagctccttatttcttagatttcttataccctctatatagtatctatatagtactctttagggtactctttaacgctatcttagataaataagttatatcctattaatactttatacagtgactttctagttatactataagttattatattatatataaataccgcgatagggagctagtatacccagttatcttattcctagttaatatataaccgtaggaagtactctagtacctagttttaacgtttagtctatctatcggtttagaggtagaatatagtagataactagtatttaactataaggagaaagtagaaggtcaactagaactagctagtaaaaaggctacccctattgcttactagattctctagtatactaaagatcgggctnnnnnnnnnnnnnnnnnnnnnnnnnnnnnnnnnnnnnnnnnnnnnnnnnnnnnnnnnnnnnnnnnnnnnnnnnnnnnnnnnnnnnnnnnnnnnnnnnnnnnnnnnnnnnnnnnnnnnnnnnnnnnnnnnnnnnnnnnnnnnnnnnnnnnnnnnnnnnnnnnnnnnnnnnnnnnnnnnnnnnnnnnnnnnnnnnnnnnnnnnnnnnnnnnnnnnnnnnnnnnnnnnnnnnnnnnnnnnnnnnnnnnnnnnnnnnnnnnnnnnnnnnnnnnnnnnnnnnnnnnnnnnnnnnnnnnnnnnnnnnnnnnnnnnnnnnnnnnnnnnnnnnnnnnnnnnnnnnnnnnnnnnnnnnnnnnnnnnnnnnnnnnnnnnnnnnnnnnnnnnnnnnnnnnnnnnnnnnnnnnnnnnnnnnnnnnnnnnnnnnnnnnnnnnnnnnnnnnnnnnnnnnnnnnnnnnnnnnnnnnnnnnnnnnnnnnnnnnnnnnnnnnnnnnnnnnnnnnnnnnnnnnnnnnnnnnnnnnnnnnnnnnnnnnnnnnnnnnnnnnnnnnnnnnnnnnnnnnnnnnnnnnnnnnnnnnnnnnnnnnnnnnnnnnnnnnnnnnnnnnnnnnnnnnnnnnnnnnnnnnnnnnnnnnnnnnnnnnnnnnnnnnnnnnnnnnnnnnnnnnnnnnnnnnnnnnnnnnnnnnnnnnnnnnnnnnnnnnnnnnnnnnnnnnnnnnnnnnnnnnnnnnnnnnnnnnnnnnnnnnnnnnnnnnnnnnnnnnnnnnnnnnnnnnnnnnnnnnnnnnnnnnnngaggactataataatatagtatataagtcctataatataagtattatagataagtattatattactagcgatataggaattctagaccccctagtactatacctaatagctataagagctttttaaggtaaaataatatatatactagtactaaagaactctatagtaaaattactctatataacacaggatcgcgatctaacgtcgcaggacatctatataaaaatagaggaggatagtattagtaagtaaaagctaagtaatacaccctagggattaacgctaaataggctacttaggtttaataactatatttatatcctaagagagactacgatcttatataaaattataaagatatactataataatccctagggaggctattatactagtaaatataccctcgaagctatttagtataagttctattagtatagaattataaaggatataaggaagtatatatataactatataaattattaatataattcagtatataggtataagctatatagattactatagctattactagtacctaaaaggcctagtaagtagcttagtatagattttattactagaatacctttattatagtagaatagtaaggtatataatatagtattagtcttaatagatatatttactaagtatatcctttatcttccttatataaaagaaattaatatatctaagttagtagatttattatataaatatataattctaatctttagtatactaaagaacctagtaagtaatagggatagcctttttactagctaattctagttaaccttctacttccttcttataattaaatactagttatctactatattctacctctaaactaatagatagactaaatattaaaactaggtactagagtatttcttatagttatcttgctaataatctagaccttcgactatactccattctgccgggccttcgacgtgtctgtggctcagtgcgcccccgctctagtgctaagagcatacgcaataaaagaccaaacttctcggttgcctctggatacgtaagggacaaaattatacttttggctgagggattggctgttcatgcaatgatacagggtcattttctcgacttagtcgtcttatagatgagcggtggttgtccacccaaaaaaaaaaaaaggcctccctttccgggaaaccatttatcgcgaagtaaaagtgaacttggtgaaatgttaactaagactgacactgggaagatggagcctttagcagtcagtatccctcgccattctagaaccaccgtaacactgacatatagactatgcgtatccaaacctccctaaattgcgatctttacactcaaggctcgaacggataccatgccctggatcatattcaattagagattcgatcagtagagcacggccttcatgatgcagtcctcctggccattcctctgggcaaaagccagtttgaccttgcagttaaacaggccactgtcaggcaaatcaaaaaccacttcacagacctaagccactcgcgtctagtgagctatgatcctcttttcgcagccgaattcggtcgttcctttccagaaaccgcattcagtgctttgacgcaaatgagatatcaatacaacctggcggcgagttcaattcacttatctaaggacccacgccttatcaaatggtttaaggctgaaatcaaacgcattgaaattctcatagatgagtaccgacagcagtgtgttaacctgggccgaattccagattgtgtcaagcagcaatagacgaaactcaatcacgtctgcaaagctatcttctacatcttgcctaattaatcatcactgtaatttaagatactgcatgttcatactattggccctttcccgtatgccagtcatcgcgcaactgcggagaatttgctcaagcacctttccaggggctcgtacgtttcgagcgtaggcaaagcatctatacatatagctagcctcctaagttaaataaaattataaactgctttcgcgcagcgcagaacgagagatttggcgtgaagaatgggattccagtatcatgcgtgaccatgtgtcagcaagagttgccgcaatctgcatattgcatcccacgatggcttggtaactgataccgaatttcgagaatttcctggtttaagccctgaatgaactttatcattgatcttctagcgatagcttgacatcaggttgaatcttgaagaaagcttgaattattcgggcggataaaggccttcttgcttcgtaaaatctttctcaatgtgacgtatttcttttgggtatgtagagcaaagtgagtggcccaatgttaatccggctctagtttaataaacgggcttagggccaggtgtctatccctacgagcacagcctggtgatgatgggaattggacctcaaacaagggagccggcggtcgccctggccaagtttcacgctttgccctttctctggtccacaagcctaggtgtcgagtagagttttccactgaagtgatcaggagattgagcaagtctagtaggcgtgaaccgtcgagcatagtcatatgtcatccagcgagagaactaggtagatttgaactgtacctcgtagggatgtcttatcaggtaactcattattccaatacattttatttgtatattgggtgagaagcctcaaaaacagcaagatgttgggttttcatggagtcggcgattgacggctccagtacggggccatcggcggttcgaacaagcgtaggccgaaagggaacgtctgtatgctccgacatacaatacactacatatgctgtggtggaaagactccaagggccaacatatgggttcccaggagttaacggatctccaggaccatcagctacgttcctaggaatagatgctgcgttcctggaagtaaactgggatctatgaaaccacatgccaatcgatcgattaattgattcatagtctgtcccagccttttggaaacattgccagccacacttggacaacagcaagaccatcgttttatgggtctggctccatgaccgtgtgtataataattaaacacgtggaactgaacaaggatgggaattatagaagatgagaattcgtgaagcctcaggcagcaagactactggaaggaccaggaccgtggttctgaatgagctttttctaaaccgcgaacttgaaagtatccttgaactccaagtagatatatgtgataaccacagctatatttatatctgcttggttaggatttcgctactagtctagaatgtctagaagcttctaaatatatatcagctatattagggttcttatagttgtggtcgatagaaagaactactagagaggcgagataaccgaaccaaggaggtttataaatatagctagcggaaggaacgagccggtcgggcggttcaggggttcgcgtcgcggtccgtcccgccattattttcaaaatcgattccgtcgccacgtggcccaaaagacattaagtagctccgacaggtttacttgcatagaccgataccccagtttgtcacccgataaatgaggtttctggactctcgaggtggacaaagcctctctcaccccgggtgtctctcagtttgctccttaggcatacatcacgggcaaatcaactaggacgggaccgcttcaaccaggctaacctgatctcaggccctcagtgcgagtgaggtagttggttcccggttgtttgtacactgacacgcgcatccgtcctctcaggctatacagacagtctcttgacaggccccgaccctgccgcagtggctgccattgtacaccacgccccgcgagagccttcactctcgtttcgcgttacctgaagaggtctccccccgccaggccgaccgtgtcttgcgaaaagtcctccatgcgctccatcgggcagtatatgtcggttgctctccactaaccaagtttggtccccggtgtctggacagggtcaagacagagcgtggaaagcaccacttggaatgttctactgagctaccgaatttgtaaatatgatcttagattctcttagcagcctcatttaacgcgggccattatccatctatgatgatgtcgcaaaccccaagaattatgtatacggacttgccccagtggttcacattgcatcatccctgacgagaataaccgagcagttctctttgagaaagatagtaaaaatgacagtagaactataattatcgcaagccaccaggttcccaagatagcccctcgagttgagaacagaagttcaatgaaacctgctcatagctcagctccaggttacttacgacatccctcactgcagttgcagccaagaagatcacattcttttttttttcttttcattagtgatcgacccaaattcacgagttccatgggtttacttacttcctttgccacaaaacgggtttggcttcgatccatctgcgcatagtttcttgcaaatttcagtgcccagggcgtctgttgagcagtgtctcttgcccactccatgacagcactccgccattgaaagatgcgctgttgcaaggaaaaggaggcaaagtgtaagaactttgggtacacttatgacaaacatcttgaaagtttggtctaaggaggtcagttggtgtacagactggggaaatgctgtgtatataccagtaatgaacaagtgtacaatgtcttgtcgaaaacgtttttctctgttggcttctgcgaagatcaaaagtgatatgttttcctttcatgtcaggtagtctctgcttcttattgtcactgtgtctccccccctttggtcccctttctaggagataatacctgaagatccacagccctctagggatgatatcctgctagagttaaagaatgccaaggtctgaatagagtggcatttgctccgccgaagatggaataatccctgtgcgatccccaatgaggatatgctctgaatcattagaagcaaaataactctatcttagagatcttattggcatatcaaggtatgacatgtacctgttcaactttgataacgcagaagggatggcattctaaaggttcgctatttgattgagatcttcaaggaaaaattacatacctcgtagcactggagagctcttatttgaccaatgctgcatgcacaccatcatggctcttttcagtggcgttttacttgcaaaacaaatctacataattcatgtctttatcatcactctccacaaggcttcacatcgtactctacgtcagtccgaatgatatattttgctcccttcctcacccctgtaccttcatgtagcaaggccccattcgactccccatgagggaatatcgcaacagctcccatcacaggtcgcaccgggtatccgttgagggtcccttcccgcggggctggcatgaagaatgtcgtctctccgccctcaaactcatcattgagatatagtagaaatgtgtacatcgagctctgtttcttttcctcaggcgaagagtcgtacacgtatgtgtcatcaggaagaataccggacggcggccaagctccgtcgatgtgacaccgatattcggctccgggaacatacctgtacacacggaagcgacgattgatgcctcggaccatgcgaccattgatagagggtggcacataaggggaaattcgtgcccaaagcatgtcgtggaatgtggtgtcaatgatccagtaaaagttgtgggctaggatgctgatgtccccatcctcgcgaaggggcgcgtccggcaggaaattaacagattcaccggcagcgatgatcgccttgcactcggtgggggataggacattgagtgcaaggccaaggcctggcacagcgggatgtgcgtggtatgttatggaaggaccgacaggagccagtgggacggcgttcggcgcggtggtatagagaatagccggatggtggtttgggggtttgcggagtgggccaggggtttgttcgatgatgcggagagcagatggagacttgggtgcctcatccaaaattgatttgtcaaggactgaggcgtagacgggaagtggcgtcgtcgaggggcggaggtcccagatggactggaaggcgatgggattggttgagtcaacggcgtttgtgttggtgtcaatcggggtgctgacgcgcaggatggcatcaaggacgcccaggatttcgttttccttcacactgcgctgaatggagacatgatcgtgtgatttatgctgcgtcgagaggccgctgacgacatccagatctcgcacccagcgacacaatgctccaatcttgggttgttcccccctgatcctcatctctgcaagcaagatcttggcttcaatgtatttctcgtccaccaatgcaccggttattcgagctgtcaagttggcgccctctctcgaacggttagcgacagtctttgagcaggaataacgcaacataccggcagtgttaacacccgtagtgcatgtctggcggaagtcatagaccgcgactcgcagatccttgcatgccttcgactttgtcaggcctggatattgtgcaagcgccgtgagcgtctcaattgtaatgtcgagttcctcgtctgagacgacggcattgagatgcgtgggctcgagaggtatgccatcgggaggcggtgttagattcggtactgctttcggaatcttttgtggaagatcgatttgtgcgttgcgcttacgctttgccgctttggacttggccatagcttttatgtagattgatacagagttcacgactttacgagtgcacgagtctgcgagtcttccaattcacggatattctgcccgaagattccgaccacgggattgcactcggattatataagtcacggagttttccaaggttccgcagcttgggaccttcagattatcttattcgccatacaatccaacctgaggtggttggtgatacattctgacatactcactgttgccctatgcagtttgtagaccttctttgtggcattccttcccttctctttgacttctctgacagacagcttgccgccaaacgtgtagcttgccgttcagcttgctgcgttgacatttcatttgtacgtctgcagagatgcttcttctgttttctggtagatgtaatctggctggcttcgtggtgtgaagctatatagacacagcttcaggacagtagctagttctccattttccatcaatccatcatctttccacttccagttgaccactccttcctctgtagtcaggacctttcatcaattggaaatcttgcattctgtctaattgtgaatgcctacatatagtaatgtaatctgtacatatgtccccgcacttattcttcggattgatggaacttttgcttggaattgtcgaccttctcatgtacagcacgtgcctttcgtttcgttttggtgtaaccttcaattccagcgagcatgatataagacttgctcatcgaaacatgggacatatcaacgccttgttgctgtagggcgtggtggaatgctcgaaaattggcagctggaggccgataatggccactgaacaggttagcctaccgtttcgagtaatgatagaagtcgatggatgaaagctttgactgaactcacctaagcggtgtcaggcttcgaagttggccatgtttgatcttaatcgttccagctgctgcgatacgggcacctcgaagaaaagatgaatgctgaaaggcacctgatttctttatgccgatgtatagacgaaaagaggtatctgcaacctaaggtaaatttggtttagtctgcatctaacaaccacggatccaaacctgactcacgaatagccagataccttctttctctgaggacttgccccagagtcgcttaaatgcagcagcggggcttgcgtgcaccacttttttcatcgtcttggcagtgtactcctcatcggtgaaatgcttcgggtcatgatttgagaggacatcgtcagggctgtgtcttctagacgttgttgatattgttgatgatgaacatgatgaacatgatgctgatggtgacaagtcccaggtggaatctggtagaactgtcgagtttccgttgaattgaggcacatcatcctcgattcccacaatcccttggagactatctttaaaacgtgcagtgtttgtccacactggttcatcgtttttggcccagcggaaacgtccagtctcgtcaactatcaccatgtaattcaaacgttcctcgcgattgagatagcggacttgttctttctcaagtttttctcgtggacactgtgaaagctcaatatttttcccatcgccgtagtccagccaatagaagaagttttcgttcgatgatgtattccgccaacacgtgtggtacgagcgcagattgcttccgtgtcgatgtttgagatcaaccatttcgagaaagtattgaagatccatcatcttcggcttagctccagtaatctctgtgttatgttctgatcgattcaccgtagaaggcgagacttccggaaaacggtcgtcgccgccgacgcgcatagcaacactaaccactcgttgccagttccggcgagcttgattggagccatcatcatcgctgggggtcacgctcggctcgggttgatggagttggtgccactgggcttctcgaaaggcctagagggaccaaacaaacaagatcagaatcgatcggtttcgcgcaaaatacacatgtcatacgcgtacctcaatccatctagtggaagcagccaagtgcagtccatgcagctctcgtcgcgttcgataaccacgatatattctctaccgatggtcagcggacatcaacaacaccggaattcctcgtgtacctgaaccgttcgcgcggcttgctccttatcgatgacgtcatgtgaaagagtcgaagtctccagaattttggtcatggacagaagtcaagagaatgcaaaggagaaagaaacccaactatcgaggagtcaaggaaagaaagatgagtctcagctggcccggcggggaaaggtcatggtcatctttgtcatctttgtcatctctcgttttccaaaagagaacctcaacgtctccgacttgtttcattacaagaattctcaagaattaccaaatagaagagaattggagagctgaatagacccctcatgacgaattttcccttctccccctacaaagaaacgatcggtatcgatcccgagactaaacaggaaattatttccccattcaggacccgaaccccccgcattggcaatctatatcgttcttagatactacgataatacgccggttacccctcgtgaggagatgtgaggagcattgatgttggagcttaccttacttataaatggagtcgacattccctctcaactcttccattaacctcgattatacccattcacttcactcttctcactatggcaccctctctccaccctctcatcgacaatggaatcacaccaggctccagtagcttctccggagggaagctgcactgccactgcgcctccaaccaggtcgagatcaccctggatagcaatgttgcccacaaccacgcctgtggctgctccaagtgttggaagccatccggttctctcttctcggtggttggcgttgtaccgcgagacgccgtctcggtgacagccaatgcctcgaagctttcgattgtggacaaggatgctaccattcaacgcaatgcctgcaaggactgcggtgttcacctcttcgggcgtatcgagaaggaccatcctttcaagggtctcgactttgtacacgtggagttgtccgatgaaacaggctggcaggaaccacaattcgccgggttcgtctcatccattattgaacagggtttccaccccaaagagatggatgaagtgagagccaaattcaaggccgttggactggagacatacgacgtgctgtcgccggcgctgatggatctgatctccacttttacggcgcagaagtccggtatcagatttgccaatttgtgatttagcgaaagtgttgtgtcctttgcatgtactagaaaggtgggagttggtagaggtgcggagtttgaattcggggattatggaaaaatgagataatgtacatgacaagcactatgttacagtgaagattggctcatttagtagaatcctgtagaagttatattcctctcatctcctatcatctcctattctacatcaacatcggaatatcgtatctatgctgacttcagcacttgatcttcaccccttgattactctctcacctttctcgtcacttcgctgtttctcggcggattctgaacatcctcggtttccccgcgcacccgggtttttcaaaaagccgaaaggttgttgactcgatttctgcctcttcaagcgaggagcgcgtcacgctgcatcccacgcgtgcgaccgggtttcttcaaacccagtatacatatctagtcgagttccagcgaacggtgcgcgaacagaatatgtttagatttcccgcattattactgggcccagatagacgagttgcatcaatttccgactgaactctatgagatgtgagcaagggctggttatgtattcctgctacaactatatggaggttcggagcttgatttagactattgcggagtctggagacataaacggtgcctcgtctatccatatgaatatctttggccttgagccaattaccaggtttgggaccgagtagaacgaacgttcactccactcattgctcctcgccacacatcatttggaaaggaatatcttcttttgtcttctgcattgccttgccctcctttactacacagagaagagcaggtaccaaacaagtattggagcatcatcatatgttcctatccattcagcattttattttattattagggaatcattctcgttgcagtcatgctttagtatatgtcaatggtcttttatcgggaatttgaattcttgaactgacgcgtgttctcgaagtttctagtattgatgtagtgcaagtgatcaatgcttgacattctgtacacagattttcgctagttaagggcgtacgttcttggctatctttcttcggtgatatggtactcaccagggcatgaaaagatccaagaaacagatccattgatcatatacgcaaaatatctcaggtcagtcctcgaccatgatcaatccatgtgtactgtgagtatgtctgacttcaatccaggatactgcgctattggtccctactcccatcgtgtatgaatgcttgcgagcatgcgaattttttggggcacagagcatccaagtattgtcctctatcgagctttcaagacaaaggacggccacctggtctgagcgctacaaacaaccaccattctcaaattctttgtgtgttgaagctatcagagctggcgactgacctacggtttgttgaccacagctctcgtgtccaaaatcaggttgaattaaaagagatatttgcaccaatcatctgtgcgaagccgcccgtcttcgatggtatgaaatgggattttcgacgaaggaaataggggtaatgcgagaacaggggcattacgcgacgatcatgagctttggaatgctctagttccagtttcctatgcagatcttctgctatggggaataagccgccgctttacatggaatatctcactgtggtatcaatactaacttggtggctcatggatgtctcaatataagatgctagttcgaaattgcacttttcgatcttttcaccttactctagcatcatcaaaatggatcattattcagattcatatatccatgtacaatcatactaagtgaccaaactatatatggcgtatattcaccctttccttattctctcaatcttcagcagggtaaaaaaatggcaaacataaaaacaaattgacatgcaccaatgatagattaaccgctcagcgtaacccaagctacagcattgagtggctggcgcaaacgatgcagcagcaaaattgagtgagtcaagccaaaggcactagtttggcagctaggagttggcgtagctgagtgttgaattacaatacttgtggctagctgggagagctgaagcaatttcatgaaccctagttcgtgccaattgccaagccagcatgcaggccaaatcaaaatcttgtctaacatttgattggtgatctccgagtcagatcatgtcaaaccgctctaggttgaggtcgcagctgcctatagctgtaagttgccattttgaagtagacgcccatagtagacggcattagcagattttggctgagaacgaatacctgcattgtttggtcgccaataatttcctcacgctgcacgggcggtcgtaaatggcgttgtctgtagagctgacggctacgctctgatgcgtggcttgcattaaaatgtgacaagacagcatatgttaaagttcattcaatgtcgatcattaattgctttgcaggagtctgagactgctgttcagcctgtcctaccttcacaagttgtggaagaaataatataaaagattcgcctcgacccggtgtccccaagtacattcttccataacttcgaatgcacctcttcgggcgattgagaaaaatatcttccaaacgaagtattgcttcaacaatttcgataattccaccagccgataagatggcatctgaatcatctgcgtacgagtactaccagatccaagcccggtttccggccaaagattccaatcctgatgatggcatcaaccgaaaggtctttgtccggcaggatatcgacgaatggagcggcaagaagtccaacaaaaagcaagtggatcttttcatcctggctctggacaatttccagaagctggaccccaaagaaagactgtcttactttcaggtcgccggtaggttctgcttgatcagcttctgttgatggtatttgacatgcatttgaccaggtattcatggacaaccgtttgtacgatgggatgatcctagcccagagcccatgcaaaatggctactgcttccactctcatgtgatatttcccatttggcaccggccatatgtgcttcttttcgaggtaggaggacctgatatctgggaggaattttgtactgatttcattctagcaagtcgtgtatgacatcatgatcaaggaagttatccctcaatttccggaagccgatcaagcttcatggcgtgaacaagccgagtcatggcgtcttcccttctgggactgggcacgaaatggccgtgtccctgacttggccaaataccctaccatcactgttcctaggcccgagggcggatcggatcgaatcaacaatcctctatttcagtttcgcatgcccacagacaagccgatgcgaagcgagggcgtcggtaccgaaaacacatgggaaaatgacaccgaacaggaagagtacaagaacgtatgtatgatctaggcaatgtgaagacaaaaccgagctaacttgatcagtttggcaatgcaattggaaccagccgttggccggatgaagatgaccagaatccaaccagtcagggctggcgtcatggtgttgtcaataaccgcaaagtggcagatgccttcaactctcacgatggatacaatgacaagaaccatggtcctgctgctgaaatggtgtataggctgcttactgtgcccatggactacactacgtttgcaagcacaaatccaacctcgaaagatcaaaacgtcgacgaggacttgaacatagaatatgtgagtatgttaatttgtcatgtcggagcacagtaactgactggaaattcacctggatagatccacaacaatgtgtaagtactcgaccagccggaaaatcgatgtctacatttactttgtgctattatcagtcgcttcagacactaacaacattgacttaaagccacggctgggcaggtgctggcggacatatgggaaatgtaccagttgcctcttttgacccgctgttcttcttgcatcactggtaagtatatgatcttcttcgaccacgtgggaatgcaactgtgattaacagttgcttgtagcaatattgatcgtctcttcgcaatttggcaagctctcaacccggacaagtggatggataacattcatggcgacaatgctaccatccgtgattcatttggcaaagagcatcctgtggacgaaaacactccccttcagccgtttagacgtgacgctgaaggaaattattggacccctgaaggaattagatttccttccaatctcggatattcctatccagagctgccacggtgggacagcaagtatcaccaggaggacggaacactcgaccaagccctgtttaaggaaaacatcatcaccattgttaaccgactgtatggtgtgtcgcgtgatttggcattggacccaaaagctccgaccccagagggcgttgaggcaattgacggtgggctcaaaattaccgacttcgccttcagtgttcgattcttgaagtacgttgtccctgagaaatatctgctgcaacaagaatttacatctaataattttgaatgacttagatacgcattgggagggcaacctttctgggtcaaattgtatctcgcccaagaggacggcatacaaaccccactgacagacttgatcgctgaggtgtacaacttcagccaaaagcccgagttggatggctcttcggtctgcggtaactgcaaaaaaggacaaaaatcgcgcgtcaagtcaactgcttacatcccaattaccccggttctctacaagcttctcaagggcggacggaaactgaagacgttgactcgcgacgaggtcttggcgtacataagaaagcgtgcatactggcgggtattcaaggtaagcatacctagtcactagctgccaccattgtatgaaacttgctgatctctcgtagaacgagaaagaattacctcgctacgaggttgagaaactggagttggaaatcattggcagcagcaacgacaccacgcacttcaccaaccccgctactccgccagcctttgagaatttcaagcaagagcctacaatcactggcggtgctgatggagcgctggatccagagctgaagcagacaaagactgacccaccggctccccggtaagttccgactcctataaatgagggatagatatggaaatatgatcgctaacttcagtcagaccaaaacgaccaagagcgaatctgccacttcacagcagtcttaaattccagcagactctcaaggcggacagtgtcattctcctcgagtcgtcgagcgtggatcttgtccaatccaatggcatcgacatgacacagatttcaatcctggatgcagagaatgatatcatcttccatctctccattcgccgagctcaggatgaaatcattttcaattccaaactcggtggatcatggggcgaggaggagcgggtcgatattgacgatcgattcgaaagtgaggatggtgcgacaattttgatccacgaccaaggtgaaggcttcgaagtctctatcaattgggtccatgcaatttggtttggcaaacgtgccaagggcaggacaccacagtcaattagttatgatcttggtgacaaggaggggacttccgctttgtccgagtatctcgaagtgcgcacctacccttcggtgaaagctttgttccttcaaaagcattctcatgaggaggagaagtagccacctgtggttgatatgtagtttgataggggtataggaaagatggcgatgttaatttgatcaaatttatgggaccgtggacatacatatcctcaagtcaggcctgaaccgacatgaatacaagtatatggcagcatcttgtattttgaaataagacgttgtattcttagacaagtaatgattctccgcaatcacaatctctggtcgagtcaaggccagtaatagatcccataatcaacattcttcttcagtttgtcattcacgcgcagatatccagacttttccagagtcccaagtttctgcgtaataagttcggccacaattcccccaaacaaaatgctccccggcacgttcaaatgggtataatccgctgggttgaggttgtatgtaaaagcattttctggcccgattgcattgagataccaggtgctagttttattcagatcaatataggcagcgtttgagcgatgagcggcaatgatggtggccaaggtctcattggcgagactcatgacgatacgcggtgtccctgttgatttatcgtagttgcgccgagatagaggagtgacgagaatcggtgtagccccagcattagaggcctcagtcacgaatctttcaagattcctggtgtattgtgataatgaaatgtttgctgcgggcttttggtcgtcgtggccgaattggattgtaacaagtggatgatagtcgtctcgaacttgtctcacggttgttagaacctcgtcccaataacctccgctccggaagctaacagtggttgcaccgttgtgaccgaaattgcgaccagatgctcctttgaaaagggttgtattgagaagtccatctccccatcctcctccgttcgaggattgagttgccgtggtgctatcacccaccaaaacaaaaaactggagtcttatgcgaggatgcaaatgcactggaaggatatgcctgaacgtaagataggatactgaggagggctactccggttgctttccagatcacgtccattattgtgtacatggatgcaacctttgtgagttattggggttagagtcattctccgcgaaagaagtgttttcatataaacttatagctctcacatgtgggttgatacactcattcctcccattggtgggaattcctcaatgcaggaaagtgatttgcttgggattcatgaatggagtgacgacattccaccaatcatcctaaatacggaatggcgcaggttgtgttctttgaagaattagtataatgccgtgagaatagaaaaggccaacgtatatccatcacatttcagaggagtatagggcatcacgccaggtagatcatgaggttgtttggttcccccactggcagagtccgagctggatccatcgagtacatgtgaaggttcaaagcatcgcagaattgttggattgtgtggtggatgagcccgagtcgtagggcggacttggaggaaacaaggtggaataattaaattcacatgtcttctgcattggtcagactttcatgagcatctccaggtctctgactgatgtccccaagggcccaagcccccacgagcagaggcaagagtcttcagtgatcttatatacagacagcccttgacggtggatcttacccagaagatcagttacattatatttttcggtcatcttaagttgttttgcaattgaacgtggtagacctaactgctactctaagcggccatatatttcctcggcctgttcttgagtgcatcgctcacaggcgcaagagaataggaagtcttctcgcagcagcttttgccgtgctttgaaatctacatatttgcatagatcaaaatagcaaataaagcactcgtcgcctgcggcaagatcttttgaggtagtcaataccatccgcccattgttgtctgctctccagatgacctaggatatttgagtatgtttgaaatctagtattctcgaggggtaacttacatttggaatgcaggaatggttgactatagaggctcttgggtagatacccaagccataatccacgcctcgttcgattggggggtccggaatgggaaatatcccagtgtcacttggatatagcccgaacgaattagactcttctttgcagatgagatccactagatcatcaacgctaaggtctgactgattatcgtgagttagatatacctcaactagcctcttccagtgcaaaatctgcgtctgaggccacctctcccggttactgtggaggatctcaatggaatcccacccccgcttgaaccgatcttcccaggaatagagctcagatggcttgaaccctgcctgtaactcaatgtaccttccagctagaagacgcatgactgtccaaagcatggcaaatgcatactggccctcgttttgacgaagactttctccgtagtttttcaaccaagcgcattcaaagtcatgccgagcctggtctgccgtccgacaacgattgtcacaccaaacaacatcccggatgcaattcctttggcaaatctctctatgtgtgtcccgtgacacttgttggcggcatttcaggttactgcaaatcgaggcatcaggatgggatggatccgcagacgggatcaaagcatatggtgtatctgccagaatcatggtaccggctgacacaaatgccgagacttgtagcaatcttcctttgtgaggattgtagctttgtgtcaggtttggatgcacgtagatatccgcgtcttgctccagagcatcgacagctgggggcttggcagctgtggacttgactggcttctgtgcaacgatcaactgcctgcgttccatcatacccatgtccacagggccgtctcgcttggtcgctgtgatctgcatcccatcttctgcttgaaggaataggccagatctttggagaaggttgtccatttcctccagatcgtaaagtctgacggaatagaaaagatcttggcggatcgaaggaccttccaaatcaatcacaatctctcggctagcgaggagggttttgtcgggagacagctctcgttcccggcaggccagaagtttttctttgccctcaagccattcccatccactttgactgaagttggatcaaatccatgctccatccacgtggtcaatgacgaaaattcctcctggtttcaggacccgagaggcctcccggagggactgtaggtctccttcatcattacagtgtccaaaagaatttcccagaagtatgaccagatcaaaggaacaatccgatgcaggaatccgacgaaggtctcccttctgaaacgtgacgttactctgcacgttttcttctattgcgcgttttcgagcaaggtcaaggagatatgtgctctgatcgatgccgtaaaaattcaccgatggaaagcgtttggcaagattgatgctatgtcggccttggccacagcatagatccaataccttgatcgaagattcttgggttttcaacagctgttgcacgctagatattccgatgatgtcgttgcattcggcttctgtgattgcggggacttcgacacagtcaccatcggtgtagaggtacatctcattgtaggccttcttccaccaatctttctcggtatgaggaaacaatgaggcaacacggccaagactaggaattgtcattctaaagaatcttgggcagtgaaaacaatcagagacaagactgttcacacggtgactatttatacccatttgtctgtccatgtggatatcagttttctgcagggaaaatattccctgcgcacgggtcttcttgatcttgcgatcttcatggcgctaatgatcgtgcatcatgcatgccacgtcatagaggggtcgaatacgagctatacaacatacaaagggcagcatagcaaaaagattcagctaagctagcgaagtggacacaaatacatctaacgaatgaagccccgagatggcaaacaccaacaagaatactccgggacgaatcatgacgctcactttgggctcgttcggtgtagttgacgagatcccacccctcgtttttgtctgccatttcacaccactttgatattcacacgtttgaaagatgggggctttaatagacagacactggcgcgtgcttatggcagtctgcacattaatgtgggggatttactttagtacctctatcgacttttcaccctgggagcacagctgattcgtccagtttatgatcttcccgcccccctgtcggtttcattacaggaacatttgttactttcaagctctcagtatacgtatttcgtctctgcgctttatacagcctacgcggcacccaacacgatcctgccctttttctcggggttcgctgtacagcgggtagggaaaagaacggttctcttggctaccctcacgagcgtaatagttggccagttgatcttcgctgtcgccactcagttgcgactccagtctgggatgatgattgggcgcgtgcttattggcttaggcggagagataattggcgtcctaggaagtgaaatcacaacgcgctggttcaagtgagctccgattctatcaaactcggggtgctgctaacatctgttgctcagggacaaggaactatctttggcgctgtcaatggttctgtgcatatcgagactaggctccgtcggagcctccgttttcgtccccaggatggtcgaaagctttggcgtggtatgcgttgtatggatcgggtcgatagtgccattgggagtcgctgttactggtgctttttatctactagccgttgacactacaacttcgcaccatgagagtgagaacattgattcgataaaatcgcttcgtcggtttcccgctatcttctggcagttggccttaatttgcatactgggctacggaggtatcaatactttcactatctctgcgcagcggttcctagccgcatggttctacgatggagatcaacgcaaggctggatttgccacagggtaagtcaatttaccatcacgctgtccaaagctgacattgatcctatctagtataccatacttcctctctgggattctgactcccgtatttggactgttgttgaatttgccatggtttcgaagctacccgggggcccttggtgccactaatatcctcatgatggcagcgcatcttctattgctttatagaataggaccgattggaccgatgtgtatgttggggatagcgtttgcatcttatggtgtggtattttgggccgggctcgcgcgatgtctcctctccatcgtcgagtcctgctcgtcaaagacaaatatgccagaggccgggtgcagagcttcagatgaactcgaatatgggaccattcaactcccgacacaactctctgatgatcgctctgatgctgacggagataacttgccgggggagacgggtgaaggcatcatcacacttggctatggaattatgaccagtctcaatagcctgagtacggctgtggttccgatcctcctcgccaagatagagaatgccgtgggctttacaggcttgcaggttttctttctcatactatcattactcgggcttttcgcatctgttgggttgtcatggtcttggaggatctagaaggaatatatgtcatctcgactgctatgtgagattccgttatctctttgcgttgcactactacttcaaatctagtcgcttcatgtcataaacgcactgtcaacgaccaagatactatggcctacaatgttgtatctgcatgggcttatgtagcctttaaaatcctcgcattaagtcatatgtcaccaccaccaaccaactttgtgtcaaaactagactagagagaatgtctccgaaatcaggcacttcacaggcataggctcaggcatttacacattatggtgttgattattgaacaggtggatatatcggcaccaaggcaagtctttttgaactttgtaaacaatattgatatggtgcctggggtgatcggtgggcttaaatacccagaataaccttgtgatcggcggccttctcctcgggctcgccgaagatatcaacgttccaacgaggcttgttggcaacataaggggtgttgtagcgcttccggttctggcccaaagcgctgaccttctggacctcctcgggggtgagttctatctccttgaagttgtcacggatgcgcgaaggcgtgaccgacttagggatgacactgtgtccaccgacttgagaccaggcgagactagaatactgttagctttcatggaatggtaccacagaggggttggtaagatcttacatgacgtgggcggggctgacttcctggccagtgcgctttgcaacggactcggcaacttccttgacttcggggcgggtgatgagcaggggaatatcgaactggttgttaccaaatgcctagaggctggatcagcattgggtttctcggcaatcaaccaaaagatagatacgtacagagtaagcagtgacatggattcccttctgttggcagtattcgatcaggtcattgctctgaagcacggggtggcgctcgatctggttggtggcagggacgacgccggtggctttgatgagagcctcgatctgcgagggtattagtttgtgtatggcgagtttgggaacaaggaggatacgaacatgctcaatcttgtggttggagacaccgacggagcgagccttgctcttggggagctgggtcatggctaagaggagttagtcgggtctgagttttgttcgcacaatatatccacgtacccttccaggtgtccacaatagagacaccatcgtcaatgatcacatcaccaccctcgacggtgctgttggcaacgagcgggaagtatgaatcgcccttctgaaaggcaacgggccagtgaacaaggtaaagctttgtctgtcagccatgtctcacggtttcactaaatgggatcatcatacgtcaagataatccaactcaagctcggcaaggcaagcatccaaagaggcctcgacaacctccgggcggtgctggctacatgtagagtcaataaattggtagtctaacaatggagttcgagatatcgtacgtgttccatagcttggaggtctgcaacgtgacacgtcagtttgtgaaatcatgtaacatcccaagttggtatagttcgacttacgatgaagatatcctcccgcttcagaccgggaacatctttataagcacgcttgatgccctcggcgacctcacgctggttctggtagctgtaaacaggcggtagcttgtaagtatggtgcaattgtaataggtaatatttcatgccggagggattggtgctgcatacatcgttgccaaatcctgagagaagtgcgggttagccaacagtccgaagcaatgatagatgaacatgtacacaccaggtggcggtagccagccttcagggcctcataaacagcctcgccgaccaggccaggagcagactgccaagtaccaaatcctagctggctggacgtggagtcagtgaagtttctcagtattttctaccgaatatacgcacgggatctggtggccggtgttgagagtgactttcttgccgagagacatgatgtttaaagcggtttaagaatagtttggaagaggaagaggaagaggaagagaagaagatcccccagtctttaacttgttcagttctccggcggggcttctggactgtcctatccccgcccatctcggaggagactccaccgaggtaaatgatggatgttcgaagctgaatatagagtatgatagaaaattcatttacgtctatgtttgcatattcagcttattgaaatgtctactgttgtagcgaatatagagtgcgaatatagaggatatccttgtaacctactatatacttagtacaccctacatagacggtatatctaagagagaccgcggggtaagttatgatgtcattctgcgaattccgggattgaactcttgtggctctcatgttctttcatgtcgtccattttccattatgatttcttttacatcagcagtttggtcaccgtgtggtgttggctatgctctcggatcgtccaattgagcccgcaatattacgctgcggcgtcacccggccgagaatggtacaatatggcagtgctatgtcaccatcgtttcagtttcgaaagcatcgaatcgcatcgaatccccttcattatccttgaacgtgtccacagaagccaagttgccctatattaaaaataccctactccgggcccatgaataccctcaaaagttcgggataattgggcgcacccaatccactcactggatcccaaccctcggtcgcagagaacccctcggtgttgcaacccgggttggtgcccttggtcacgtcaaagaacgcctccgggtgggcgtacaatacaggattgacaaagccaacagtggacttgcccgcggccagtcgctcctcgttgatgcgcgtgaggattccagcaaacaccggtgcagaggccgacgttccaccaatcgacacggcaattcccctgtaatagatgatgaccttgtcaccaatagcagcaacgtctggataggcacgtccgatccggttgtagataccgttattctcaccgaagctgctgttgtccacgctctcatagtatgggtatgagggcttggccttgtcaaagtaatcggcaacagcctgggcctgatagtcaggcgccttgtaaatgttgctgaaaccgccgccggacgggtacctagacacagcctgctccttgtgatctcctggcgcagaacccgtggggatttcagtgcctcccaccgcagtaaggtatggacaggaggcaggaaaatccggagtaaagattctgccatcggggccgaggcagttgctgggggtagggtcgcctccgcgtccagccacaccagaatcacccgaagcgaccaccactgaaactcccattgtacccagcttcatgaactcggcacattgtcgccgctgataggaaatcgggaggtctgcttcggcggagccataggaaatcgagatgaccttgggcgggtcgtacaccccacattgcagggagcccttgtagcctccgtctgccgggtcgggatatggagggtccaaaggcgagatggtactgcagtacgagccgtcgatggcgtccaagaacgtgttgaggaagccattgaaggtataatgattctcgtaatgcatatcatcgctttggaaaagcacggagttctgcggccaaataatcgggtaggagatttggaagtccaggttggattcagccccagcattgaaactgtccgtaggagcctggccaccatcaaccgacttgagagttgggtgtgtgccatgggggattttcctgctaaaaagtcagaaatccaatcaactaggaatttcaattcaacgcgacatacgagtacaagttcgagaagaacaaatctaaatcttcctgggcgtagacatccccggtaccctcaaagactcccaattcattcccctttgtagcagagtggccttcgctaatgttatacatctctgtaggcttgtcaacacatccagcttgtaggtattcgtactcagatcacttacgttgaatgcattggggtgtaacgactcgggagcaaaaggatgaagcctcactcagcagctcctcaattggtatgaggatcggctcaataatagggggagccccatccacgacgcgtttctgcttctcagtcgatctccgtacaccagtcacctcccgcatagaaatccctggagtgacatagtcgacgtgctcacgcacggagctcgggagatgatatctatagtcaggggtcagcgagactatagatccaatccaaatgatcaatcttactcgcgacaggccacatgcgaccggcccgtttcagcatgtgagtagatatagtactctgtgtccagcaaattctccagttccttggcatcggcatcaaactgaatccattgcttgttggctgattgcgtgatgcggtcttttgcaataccagttgattccaaccaagaacgcacgtcattcacgctctgttcagtcggggcaaagaggtcgtgcacttccctgatggacagatgctgtccatagcgactcgagtatgggttggacctagacagatgtcaattttgcacggtggtagattcattgcgcaagtccacacaagtccataagtagctcatggccatagtcaaggttagactgggtcaacccgattcgcacaggtagtgacacatttccttcgagcttcttgccttcaacccaagattttggaatgaaatcacgacgctcgtgcaattgataattatgagcccttggtactgccatcacactggccgacagggcacaaagcacaatgaaagatctcatcgtaatagtcttagaaggagttagctaattcagcttgctccttcgaacttacggatcatgtgggaaagacccgcgtcggacaatgcatcctttatagcattcaggtcgttcatttggactaaacccacccaagaggaaggacagccagttgaccaacgatgctaagaccccggcaaccaaacagggcaaggatagagcttatcctgtttgccattagcctgtaatgatctcgctaagggttgaacatgccattcataacgtgaccataccaaatcaacacccctcggaaagttaaggcgggtcacacggggtccatatgaagggttgcgttcttcggcaagttctcaaaaaccgcgtcgttacaacccatcaagtggacgagattcaagacacttagaaacatgtatcttcgtcttcggtcgtagaggttccattgggttcaaacctccgaacatgatcctagcaattaccgatatgagaacaatgacctcacgcgaaattaacggatcaccggtgttgtacctcgggaaaaaaactacccctgagagattgactcgcaaccagtacatgatcaaacgcacaaggcttggaccattagacgtcgaatgtcgaatcataaccaaaagatttccggttctttggtgccgaaatgaggtcgttgctactgtacattcggaaatgttgggaaaaacttgaatcggttcgggaccaagatcaggcttgaatccactgttgatgttaaagcatcatcttgcaattcggtgggattatcgggggatacttgcccaggtggtcaaatggtaaaagtccagtcttatgcactccacacactgtgcatcaatttacgatttaaaggattggcggctattccaacgccatggacactacgggggaccatgcgagtcttgcatcgcaaatatcatccatacactacacggctgcctaaactccgcagatagggatgatctcatgagtggtattgaagagttgatacagaagaccacccaaggctgcataattgcaacgtcggtggcagaaacacggttgcatgtgccttttccaggcagaagtcatgcgagcaaaggatggaagcccttggggtatctcatgtgcagagaactttatgtcggcggatggcattgccgtcgatgttcgggtgcaggttattagcggagaactggagatcaaaatttgaatgaactcccagaaatcccagaactaaagacataggcagactgttgcctggaaggttcaggtgaaaatggcggcacttctgccacatcggtaaggggatgtggttgaaaattctcaaactgacggttcgaccgcaaggtctctcgtccatgacactgacacgggtatatttcaactgccgtgccttgagcgcatcaaaaggcggcctcaaactgacgtgatattcgagggcacaattcccttctcaatttgaaataaccaaccattcaggatccacaccatttccataataaatccaccagctgctgccgatgcaagggcttggcgatgtaatcgtccatccccttcgccaaatacgtctctgcgtctcccttgagagcattgcccgtcaacgcaaggatgggcatatcgagtttcatccgtcgaatgtgctctgtggcggttaatccatccatgaccggcatgctgatgtccatcaggatgacattataggccaaaggcttctgcttcaccatacgcactgcttccgctccatcccaggcagcatcgacgcgcttgaaacccaggctgctgagaagttttaacataataagttgattgaccttgttgtcttcgacaaggaggatgtgtttgtgtggggcgatcttctcgagcgaggcggaattatccaatgcctcaggtatagccggttgcaatctctgcttcactgtagacactggcgaggtaaggcgagccattttggctgtcatccagaacacactaccgcgtccgtcgggattggcatggaaaccaaccgctccacccatcaattcagccaggctcttgcatatcgacaggccaaggcccgtaccctggtacctttttgtggccgtgtccgcgaatcgcgtgaagggggtgaagagggtgtttgaggcatcttcgggtacgccgataccagtgtccactacctgcgtggagattacatacatatcggggtccttttcatcgatggtataggtggcatgaactcgaacatgaccactctcggtgaatttcactgcgttggtgaccatattttgcagaacttggcggaatcgcagcgggtcacctttgaggtttggaggaaagcccgcgcttacatcgcccatgattttgacaccgggcttcagcgccgactgacaattccgaacgacagccgagatcacgtcggggatgtggacaacgtctgtgttcaaggggaaggttcccgacgatagcttggaataatctaggacatcgttaatgacctgcagcaagatagatgttgagtcttccaggatggatccgaattcccgctggtcatcagtcaattcggtcctcattagcattgtcaaagccaagagcatgccattcatcggggtgcgcaattcgtgggacatgttggccaagaaatcggacttgagcttggccgattcttcaaaggcgtcaatcaaacgcgcctctgtcgcccggcgttcagtcatgtcgcgggtaactttcacgaatcccacatggctgccgttctgatagatggcagtgatcatgacattggcccaaaaccggttgccatccttgtgataacgccagccctcatcctccagttttccttcttgtaaacagacctccagctcgcggacgggtttttttatttcgcggtcatcgcgaccgtaaaagatggagaaatgctggccgatgatctcggaggatgtgtatcccttcagaatagcggcgcccgaattccatgtcgcaatatggccgcgcgtatcgagcatgaaaatggcataatccctcacggtgtcgaccaagattttgtaaatttcgttgggataggcatcgtcgctgatggaattcgaccgatgccggtgatgtttgatccgctgggcttccagtagcatgtagatcagcgagtcatcttcaaagatgggtgtcacgctaagtgagaagaaagcgtcgacttttgccacgtgaacacgctggatgacctgcacttcgcgagttgatatggcagtgccaagagccccgatcagggaggcgatatcgggggctgggaggatggaggggggaagatcgtagacattcgctgccaacagttggtctcgtgagtgcttgaagacttccacatgactgttggacacttcgacgattcgcagagcgccgtctaaaacgagagtcggtttcctacaggggttaacgggaataatccatgctatccctccaaggggttcgggttctcacggtgtaaatcgatagatgcgactcaacgatccgacaacgggctgttcaagggatttgttctccagattcaagtcactctcggccggaggcgtgatcaccatcgcgacattgttcataggacagtcgattctcaggtggagcatctgatccacaggcatattgctaacagcctgggaggaagtgaggatgtcattcaagaagattttcagaagcaataaagggataaggatcaggatgatcagtccaaaggggaaaggctgaagaaagtcaagagggaaagttggggtggacgggagaaatgcccgggactggactttttccagtgcaatccaggccaaaggtggataaaagaagaaaaaacaaggtcaacaatgtccaaatgagcgaaactgatgttccaagaaaggcaattcgatctgctttgtagaactgaacttgtagaacttcatggatatcccctaaggtatatgaagtgatgtacgtcattcgctgtttcaccacatcgaggggcaatggaacggaaataactcggtatattgtgaatggatgaggctcgaagtatctgatatatgaacgatatgcttctacaagatcacagtctcatgctccgtccgctctaccatcttcaccaacgcatcggcaatcccatatgaaaacgcatacccacctcctccaaacccatacgcggagagcaccacccgactaccctttcgctccgaatccaaacggaaccctccttttcgggatggtcggatcccaataatgtagctcaccgtatctgcagctgggtgttcggggacaatttcaggcgctaaccgatgcgcgcgtgcaatctcatccctcgcgatatccatatcgacttcaggtgacctagggaggttagagtggatcgttttggagatgtggggatgtccatacagattgtcctgttgcttcaccccacccaggaccacccccttggatagaggccgaggaatcacataggtatattccttgccatttcggaagtgaagtgtgttgcattgatcagtggtcagaaacacattctgccctcgctccggaaaacagttatcatcttgcacatccgtcaaggttttactgccccagccgcttgcattgatgaatatccctgattcggggaacatgtcatacagttcctgaagagactcgacacgttggcggataaagcgacccccaagagactcaacctgttctctgagataaggcatatgtctcgtaggatctgtaacaagcgtctcataggcccaggcacagttgaaattgggcgggtattcaccaggactcatctcgcggaactaaaccggacagaggatgttaatatcagtcaagcgggaagcacatggagtacgcattaccttggatactactgtcttaccccatattgccgagtcaggagaaggtttttcttcgaggtattctcgtgcgttgacaatgctcacccctgcctcggggccatcttgtgccatcttgagtagtacgcgatgtgtgacagcttgaagataccgttgatccggagtaatacccccagcggcatgccacgctgctcctgcccaagccgaagcatagtagatattctggtctcccggtagatattcggccaccaataccacggggaaaccattcagcagcaattgccgagcagttgcacaaccaatgatccctgcaccgaggattataatgggtctttgagaaaagggcacctcgttggtatgaaattggtcgtattcacccatcgtgaggcgggtataaggttcaagtgacgaatgatatcagaggggctcggaggatgggaaaggggtcaggtcaacaacgttcagggtctcaaacttgggatccttcaacgcggcattgcttctgtttagaattaatcattcaattaattcaatcattcaatagcagaatgattttccacccagtccaagctatatctcactccggcaataattaagtgggtctataacggcctcttccgacgtcgcatgcccgtcagtccctttttttcccttcctatctccattcgtccccgttctacccaatcccattgaagagaacgaaatccaagatagaagtgatgtgctagatcccccgatgtcccttcttcattggctattttgttagctcgcccgtggacatacctgtacggagtactccgtatctggagacacttcatgcagccatcggtacctacggagtcgtcggtctgacattcggcttaagccgacttaaacactgtactgggtttagctgtggttccctcctttctcagcataggggaaggctcctgcagaggaccgggttcaggatggagagggcccagaagagccaggtgagtgtccacttctaagctgatccagatatatcatatcccccatatatattgttattaactgtttcacatctcagaaatccccttcagagcaagatagaattgacgttcttcacgatcgggatgccgaaaagatcttaccctatgaagccgatgattcgccttttcccgaggtgcgggctgtcatccagccagtcaatgacttgacgctgcctgttaacacggtccgcatgtggactattggtattttgtttactatcgtgagtcttgttttctatgcgaccggacaattggcaagataactaacgtcgacacaggtcggtagtggactgaaccagttcttcagcttacgacagcccagtgtgaatatcagtgctctagtagcacagttactcgctttccctctgggatgcgcctgggcgaaatggattccccttggggtcttgaatcccgaccggcatttcaatatcaaggagcatgccttgatcacaatcatggcaaacgtctctattggctctgctgctgccacccaaattatcgaagcgcttgtcaagttctataatatgccgtcacagggtgggtttgaagtcttgttgtgcattaccacgcaattgtttggcttcggcttagccggcatggcgtcgcgctggctagttggcccagcatcgatgatttggccgcaggtgttgtcaaatgccgcacttttgaccactctccattctcgctctgataccatcgcagatggctggcagatcacacgtcttcgcttctttctttatgtgttcgtcggtggtgccatctggtacttcgtcccgggatatctctttacgggtctcagcacattcgccttcatttgctggattgtgccattcaatgtggtggtgaatcagctctttgggcaaaccaccggactagggatgtcggtattgacctttgactgggcccaggtggtctatgccaaccaaagccccctgcttgttcccttctgggctggccttaatgtgatgggatcatttgcactcttcttttggcttgtgtgccccctcgtttactacaccaacacctggtattccgcacacttgccactgctcaattccaacaccttcgataatactggaactccttataacaccagtcgtatcatgggttcgagcgggaggatcgaccaaactgcgtatcggaactattcgcccatgtttttaccggctggctatgcaatcacatttggggttgcctttgctaacttgacgggcatcttcttccacatcgcgttgtatcatgggaaagacttgtggcaacaatggaagggcactagcaaacaagacgtccatattcgactgatgtcttcatatcgagccgtaccctggtggtggtttgctgcagtaactgtcctgatgtttgtcttgagtatcgtgaccaacgaggtgtggcatacgggtctaccggcatggggtgtgcttgtggcattcgtgttaccagtggtctactttatccctgtgggagtcatcaaagcgctcacaaatatcagtagtaaccaactgaacctgctcacggaattcattggcgggtatgcattcctcgggcagcccgtggccaacatggctttcaaattctatggttatgtcgccgtccagcaaggactcgagtgggttacatacctccaaaacggaattggcattgattaacatcatattagatttgtcgccgatatgaagttggctcattatatgcacatcgccccacgccttctgtttgtagcccaaggccttgccacactcatcggagctatcgttcaatgtggtgtgacagtgttcatgatcacaagaattgatggtgtatgcacccctgaagcccagggaaatttcatctgccctcatggaaaggtcacatattcttcgtctcttatttggggtgagttccatcttattgtcgatgttctaccatgtcatacctaatcaaccttcaggtgctgttggtccaggtcggttgttttcttccgggcagatatatagcaatctgctttggtttttcctggtcgggcctgcggtggtagtcatcacctatcttctaggtcgtcgttggaaagctgccaaccatgtctcctggcccgtcgcttttggtgcaatgagtctagtcccacctgccacaggtatcagcttctcctcgtggtggatagtcaacttgatattcaatggcgtactccgtcaccgcaaacccgcgtggtggtcgaaatacagtatgttcatggtttccctttcatcgttgattcttttgctaatcgtccgcagattatgtactatccgccgcgctagactgcggcgttgcagtcgctacagtaatcattttcttttgcataactctcccagctggttcgttgaactggtggggaaatgctgtgtcgaaaaccacagccgacggcaaaggcacgccctacatgggcttacccgcgcatggctactttggccccccaaaaggaacttgggagtgatcaggaatgtctgctcggcctcattttagtgtgtttctaccatatattgccgtaattaccgtttgttgggtggactttgagtatcgcgtcagtccagcagatccggatgatcccacagatatcaccctcgccgccctcgcaacttgaacaatttgggacggtcggatcgatgcttcctttccatcatcgatagtcaaaatcagtttatcatttccgaaaccgcgacgtcggtctcggtgctaagtaagacaagtatctcccgatatggacattggatctgtggggtgccctcataccatgaagttctcacctcaaaggattcttcgaaacatcgagaccgataacatgactataatgaccacgatcgataccgctatgtcattcgcgattcacctgtttccttcgtgaatcgtctcccggaaaggggtcattccgatcgaattgtcaacgcgaggagcagctgagacaggcttgtgtcccaaccccgtaattattgttttcacatgagtgaaatttggctccagggctagctgtatcatgaggaatttattgtcatgcccatttcggcctttccgaacgcgtttattgctttccattcccagcaaagcccgacaaactcagcattaccaaaatcaaattcgcggctttctctgcacggctgctcttatgtctcactctcccaaagatgactcctcgcaacacctttatgagcccatcgaaggagtggaaaaactggaaagctatcgcgtggggggctatcactccatgacaatcggtgatcatattcacaatcgctatcaggtggttcataaactcggtcatggcacgtactcgacgatctggctggcctgagatcaaaaagatggcaaatacgtcgccatcaaagtgtgtaccgcggattcgaacccgcttgaattcagcgtcctttcggaactttccaactcgcaacaaagttcaactgctagcttgaagacaatgataccttcagtattaaatagattcgagattaaaggaccgaatggtacgcacgcctgttatgtgacagtcccggcaagaatgagtctctccgaggcaaaagatgcctcatagaaccgccttttccaattggaggctgctcgggccttagcagcacagctattccttgcagttgagtacgtccactcccaggagtttgttcacggagatcttcattttcctccggttgccatttgacctaggccaactttctgtggagggtttgtacaaaaggtacgggaaccggaattcgaagcagtaagacccttcgatagtcaaccgcttccaccgaatatgccatcacgggccgttttaccaatctggctgggcgaggcaagcgataaacttaaactcccagaagccaaaatcctactcggcgctctcggtgaagccttctctcctaccaagcaacagaggtttgagtcgcacaccccgcttataggccgaccacgagaggctcggttcgaaccacacaagcctctgtccttcccatcagacatttggtcactcggatgctctttatggaacatcataggtcaaagctcactttttgacggcatgtttgcaaccgaagatagcatcactggtgggcaagtcgatgcactaggtatgctacccccggaatggtagtacaaatgggaggggcgacatatcagattcaccaaaaatggaaagccgatcaatcgggacccttaccggtcgtggggggacagatttgaacaagatatgcaggaacctcgacggaggaaagggatgctatttttaagatgctgaagtcgatgcttcaattcaggcctgagaatcgctcacctgcaaagcaaattcccgaatgtgaatggatggtcaattgggctttacctgagtacgcgaagattcgaatgatatgagtactgtaagctctctggattctctgtcaatatctaggtatacaggagtcgaaaatggtcttttggatacccttgcagattgggctacgggggggttagcgtttatcttcacatcgtagctcatgaatatatcatttctcatttctcatttctcataattcaagacaggccatcaaactttcactgaacgtccgctcacatagactttcacaatattccggtcatccccagtcatcagaaacttctcaaatattacctggatagtatcttcatcttcaactgggctcatcactcctggttggccaagatccgtggtatgaacttcgagcgcatcaaactctttgccaactgcaaagttaccgacacggtcatcgagaccacacacttgcgctccacctagagtggcaagaaagaaggcctcgggcaacgaaagtgcaggatctcgtccttgggtcaacttctgctgcgcattcgacacaatgaaggcctgtttcatggcatccaatatagacgacgagtagccaccaccactatcagtgcccaggcccaccttgataccgcgacgcaaatactctcgcacaggtgcgaccataaaatcttccatggtggtattggcgattgggcagtgggcaactccacagccaagttcttggatgcgacacatctctccttcttgtagaaagatacagtgggcaagaatcgatcgattattcaacagaccatatcgctgatagagatcagcttccgtatcaaactctggaaagagctgatgcgtgaactcgatttcctgcttggcttcattgaaatgcgtttgtattggaagatcgggatgttcacgggcgatggcaccgaccccatccagtaattccggctcacaggatatcgcaaagcgtggcgtcagtattggtttcaccaggcggtattccggatcaagtttctgaatatgacgaatgagttcacgtgtttcttgcaatgagtcggacaccgacggatcccgataccagtccggggcattccggttcatattgcacttccccaccagagcgcgctgtcctttgtcaaagcagacatccgccaagattcgagttgcctgcccatgatgtgagccgtaatatgaggcggtggtaattccctgctgcaagaagcccgtcacgcaagaggagtacatgcgtttggcatattccggatcttggaacttggcctcgtgggcaaaagtgaccttattcaaccagtcgagtaaggaaatccctcttccgacgccacgctgtgcccactggggtgcatggttgtgagtatcaacgaagccgggacacagaaattccccgcgcctgagatacttcactgggaaaacgtcggggacatggccattttctgaaagaatagagttgatctgatccaattccacatttccttgtaacgcctgaatcttgccatctgttcccacaatcataatgcaattctccaggatctcgaagtcatccagacttcgggaatggattaccgtgccgtggaaggcgaggggcagcccagagaccggcgtggcgttcttgtcgagctcttccataatacacaataagatgatataataatcaccagggattatttgcgaatgatgggtgtagttctgtgaaatgtaggagggggatagatgaagataacaggtttggaggtgaggggcattaataatcggcatatgctgagatgaggtgaaacagcctgcaattgtgaagctccttggcagaaatccatgagcctgctattcttcaatctaaagagtctattcctttcaattaagtgggagtcttgagtttgtatcaatccatcttcatctctgtctaggtcatcacgaactatataaaacattaagtcgcaggtactaaaacgattcttaatctgatgaatctggtatgcttttagttgcgacaaactaatattgattaacatgaaaggaaaaagcctggcccgatggaaaactccgtctacgtccggtagagcacggtttgaatatagagaaagagattcgttcaaagggtatagtatgatgccatctcctcctgaaaccaattgtaggagtagaaaagttgttccgccatctgtggatcgatcatcggcacagtcccactcccatccacgagcaacacgtcatcaagaactggagcgagtgggactgggggtggagggggtgcggctaaagacatcggatgagctgggagcagtgcaaatggtggaggcggtggttgcggttgcggttggtaatggtgttgatgttgtgggtgatggtgatgttgctgctgttctagttgctgttgctgataggccatttggctgaagatcactgtgctctggtgccggaatgtctctgccaaccggtccaccccaggccgacgcttgccaaattcttccaacagtacgacaacggcctgaatgccacgtcgcatcgtctgctcttcgggatgccagggggcaggctgagagtcgcgtaatgagcgggcattctgctcaaggcaccacaggatagtgataccagcaaaataaacttgactcaatgttaaccatatccattttagcttgccgactgaatagctgtcccaataggatcgaatgacttggatactagattcaccacagctgatgatactggttatgtcgggcgtcggattgcgggggctggggcggtacatcaagagaagcgttgtgtaatagagataatcgtaataagaggtagaatagagaagtgccgatgggtatactggagctgttatgcgccagtcatcaacctcatggcggaatcgactaagtgtggcggcagcttcttggggacacagtcgtggcaggctgctatatactacagaggaaacaattagaggaaaggaaaaaccagacgaaattctcaagacttcacttacagtattgatagatgcgtgaaaatatccgccgcagacgtgtcacctgcaagggaatcgtcatcgcgctcgcgccaggggcttcggtttcatcgtcattgagttctcgcagaagacccacgctaatatcgtcgtccgcaattcccaatggccgacccaaggtgctagcgataaggcgatcgagattgtaaagactccaaaacgcgcgctttgccatctcctcctccgcaatgctagaataggaccgtgttttgtgcaaacccatactaattgacagcctcatcgtcgcacccagcaaatgccaaatgctgggaccagcagtcgcaaacatagtatacaaggacaatcccagcagtgcccgcacagccggtaagtcttcattttgcaatgccagtggcaacgtctcctggctggcatggtaaaattcagctgcctggatcggatccgcagacccgatcaggagggaaatggcaatgacgatgtgataagaatgatgcgtttctggagatggaacaccaccggtatagatatggcgcagattggccataaactccggacgagacaaaaacgggtactggtatcccatactatcgaaatattgtccagccagccgttccgcttcctccagcgacgacaagcgcataactcgcggggcggaggaaggtcgtgcgaccgacggtcggcggtgctccaactgatcgcgaaagatctcgccgatgttggggagttcggtgcctactccagtcgaggcctccgagggtcctgcagtcaccgacgaaccaccactgccggcagggcttggcattgaggtggcacgattacccccggtcgcaatcatggcgggcacctgataccaccaatccggatctccctcgccatcgactggtgttcccgtcggcaattccgctaccgagaggcccgacttacggcggacgacatcctccaaccatcgtactcgtttttgtaaattctccagctgatctcgggggacggaggcgctagcgacctgaggaccgggtgggggtatggtgcaccggactccggcgcgggtgcaagcggaacaattggggtaacgaaagtcgcatttcttcttccttttgcgacaaaagtcacaggccgtcgatactcgtttgctgcgagcatgactcgaaacatctatagactcatgatgaaccggcggtggttgagaccaggttggagtgtaagtattaatcgaatccaagcggaattttcccagctgatcgcggaaatccttgtttccagacgtgctcatggtcaggggccacttaagctatccatttcccaaacatatcgaccaattgtcattgaaggaaacgcacgttcatcgaaagtgtactttagtgctgttgaagaagggaagatatgaaaagtgggggggccccgggttactttcgcttacataggcgaaacgctgatctgtccatggccgaaagagttatcattctgcgagattgtgactttgggatgattctattaatctatatggggcacggggtactacctaagtatctctgcgtttatatttatcgagaatggctgggactatctcaatatccctgtttcgtcaggcttatcttcaggaattagggttactttgcatttcccggtctctgaagacattgctgcagagctggactatgaggtcgaggatcatattgaaaatgtttactgatcaagctccaggctcttcaatctgatatatccctatccttcttaccggatccactgagccgtgccaactcccgggtgctatatacgagccgttgaaacagtaaaacaacatgcaggaactgatctacatagtacatacctgaagtgggatgagagcaacattgaatggaccctcatgtttccactatacaacgttactacagcactgcatgatatccccgtgttatttgatggtccccgatgatgcaactacatggagcttctttgcctggaaaacacataaataagccctcagttcccctcccaaaatcttgattaccgatctcaactcactcaatacacttcttcattcactgtccgagcctcactctcgctttcaagatgaagtttaccgccatccctctcctgttcgcaaccgctgccagcgccaccgtccagggcttcgacatctccagctaccaacccagcgtggacttcgctggtgcttacaagtctggcgctcgctttgtcatgatcaaggtaggctttcccgaattcacaaccgttcccttctcagtcccaatactaactatatcaggcaactgagggtaccagctatacctccagcactttctccagccaatatactggtgccactaacgccggtctgatccgtggtggttatcactttgcccagcccgccagtagcaccggtgccactcaagccaagtacttcatcgcccacggtggaggttggtccaatgacggcctgaccctgcccggtatgctagacattgaatacaacccatccggcgcaacctgctatgggctcagccaatctgccatggttgcttgggtcaaggactttggcgagacctacaaggctgccgagggccggtaccctatgatctactccaccgccgactggtggaacacttgcactggtggcagcacggcattcagcgcggactacccgttggttctggcttcatacagcacctcggtcggcactatccccggtggctggccttaccagagcttctggcagaacaccgattcgtatagctatggaggtgattccgaggtttggaatggcagcgaagccgctctgcagacctttgccaagaacgcttcttaaatggagccaattggaccgagaatttcccacaagatgtatacttgtatgtatctattggtttttgattcgttttcagatacttgtgcagatcacccgttcttgcctctttgattgaacggcagtggaattgatcgtttttataccttcccagacgggctagcagctcggaaatgtccgtagatttcctagatcgctaatccttgtaaagaaaaatgaagggaccattagacaataaacccgggagctgatgtagaatgtgtgtcttcttattggctaagccttcttcttaattaggtctaatttcaacaagtctccctcggctttttacgagtcgccccgagttggaatccgataccggacctattctaggcttcgacagttttgacttacagtaattgagggcaggttcatgccactaccaaataagcatcataggtaaaaatgtggacagttaactaaatatctagctactatgtcgttgtgactcattcttattcatcatgacggatccactccggcgctcggaaaggcaatgcaactatacggggtaggcatcgtatacttaaatcgttacttgtctagacaatttgcttctaatgcgcaccaaagttccaagcataatgtcatatctcattttaaacacagatggctttcttacgaaagatctttctgtcgtatatcttctgttgacagccctcttgagcttccttgttgtcctcgcatggcgtcggacggaaaaaccgacaatactgattgtcaactcatactctggtgatataattttaaaagaggcacagtcgacattcatgtcagatgccaggagtttgatcaaagaaggaatccagaaggtaagttgaagcttccatgacaaaaatgacatgacactgcatctaatgtacacgcttcagttcaacggaccatttcgcatcataaccactcttggctctcggttaattctcccagcatcatatatagagtggctgaaaaattttccggatttagatcatcaagcgcttgtccacgatgttgcagctccctttactaacgcagggtgggaactgacgacacacgatttcatatagcaatatttcgcggcataccccgggatggaaggacagagattggtcactgatcccagaaggattctgatcaatgtcacaaaaacgaaattgaacaatcagagcagtcgtgggtgacagcctcagggcccatgatgcacgttgggctctgactaacatgacctttcatcacagagtgtgggctgcttcatgaacatcttacggaggctcttgacaagacctggatggatcacgatggtacttttgctctatattttgctggaacgtttgattaacttattcttcagactggcacaccactgattggtctcaacatgcagtcggcttcattgggcaaatgtcagcatctgtttttgtcggtcctgaattagctcgtgatcctaagtggcaagacttaattatcacttcgacatgaatacctttatggggattcgatctctccgcgcctggccggcgtttcttcgtccatttgttcattggtttttgccagaactccgaaagtgccgccagcaaatgcgtcttgctcgtcttatgctacagccaatcttggatcgcagggcgcatgagcaatctcgctctattgagcctggtgagatagaaaaattcgaggataccatacagtggcttgaataaatcgctgccggacgcccctatgatgccgctgcggcacaaattgcgttcgcgataagcgcaatgcacacaacttctgagctactcaagcaggccttactggatattcgtatgcacccagatctgattccggctctgcgagatgaagcacagaaggctgtcgaggagagcggatggacaactgcaggcgtcttcaaaatgcagctgttggacagcgcagtaaaggagacacagcggctcaaaccgggatcattaggtatgtgtctaacccatcagtactctcatatcaaggtactgaactcactctctcacagtaaatcttgagtggaaagcgctgcaagatgtgatccttcccaatggcttgactatccctcgcgggaccaatgttgcagttgattcatccatgatgtgggacccagcgatttaccccgatcaattctcttatgatgcgtaccgttttcttcgtcttcgcaactccggtgatactgcagcagcacttgcttccatcagcccggagcacattgcctttggaattggcaaggcaatctgtcctgggagattctttgctagcaacgaagtcaagattgctctgctaagattctcttgacttatgatgttagaattgctgaggggatgatacccaagattgtggcgataggatttgaaatgctaagtgatccaaaagcaaagctagaggttaaaaagcgaagggtttgatagaaaataagatttgaattggtactatagaagactataagactgtaaataaatttccaactgagaggggaaaccctgtaataatacagtatattaccactaggccatggagggggctgatatctgttctgtttgttgtctgacagtctcccttcactcactcatatatcttctgcgggactaccatggatctcatcgaatatgccaccgaggccgatgggccaggacttgccaaagtcaacgtccaaagctttcaaggccgccgtctcctcgaagaaattttcccagaggccagcttgaccagggtgcaggaattcaaaataattatgggaatgaaacatcttgccaatcccaatatgcacgtcctcaagatccatgatccagtcagtggggagctggcgacctacagccgttggcagtttccagcatcatttggtccaagcctggttaccataagtgagaaggcagccttgttggccaaggaccccgttccacatgcaccaagaccaatgaatgaggaggttttcaatgctttcaaaaggctcctagaggatggtcgcaagcgatacaccacagataacgacatcagtaagtgacccccacattcgcgataggggtttttgctcaaatggttcatcagtcctcgatctgctagcaaccctaccggaatatcaacgacgagggtttggttctgctatcttgaaatggggcatagaaaaggcagatgcatcccagttgcgtatcttcctcgagggtacgcctgaaggtgttcctatctacctcaagtatgggtggaagatattagaggaggtggttatggattatacaccatttggaagtgttgggcaagagacctttttcctaatgatgagggatccaattttacaataagagtgcagggttcctataaagttgctcaatctactttggagattaatgtcgacataaggtacatttaccaaactgaggataggcttgaagtacatactactccaataccttcagacatgtaaatgtacatcgtactgagtggataaacgaactgccgggcacgtcatttccccagggaatttcctacacttccccggacatactctctcttccctctttcgctcccatattcatcttttacaatggctcatttcaagtttgcaatccttgacgattaccagggcattgcgcctgcctatttcactcacctcgagtcgcgagttgacatttccagttttcccgaaaccctcgatccccgcgatcctgcacaacacgatgcccttgtccaacgactccttcccttcgatatcatcttggcgatgcgcgagcgaacaccttttgcagccaatactattgcagcgctcccaaatttgaaacttcttttgaccacgggtactcgcaatctggcgctagatctcggggcatttacacgttccaatgtggctgtcgcaggcaccgagggtcgcccacccggtgtgaattcgacggttcagcatacatgggctttgatcttgggactagcccgaaatatagcacgcgacgatgcagccgtcaaacgcggtgcatggcaaggttcccttgggatcaacttgtccgggaagacattagggctgcttgggctgggaaaacttgggtcgcaagtaggaaagattggcgctctggctttcggcatgaaggttctcgcatggtcaacaaacctgacacaggaaaaggccgacgagcaagcgcacgctcagggtctgccagtggggacatttgccgtcgccgcgtccaaagaggaattcttcgcccaggctgacatcgtcagtgtacacagcgtactatcggatcgaagtcgtggaattgttggcgcaactgaaatagcaaatatgcaaccatctgcatttatcatcaatacttcacgtgggcccttgattgaggagcaggccctcctcgaggctctgaatgcgggccgcattcgtggcgccgcgttagatgtctttgacccggagccattgcctctggatagtccatggcgtaatactccctggggccaggatggacgcagtgaagttctgctttccccccacatgggatacggagaggaggagctattgcgggggtggtatcgcgaaacagcggagaatttagagcggtggttgaatggacaggagctactgcgcaagatgaattgatgaccatagctatatcaatacaaacaaccgaggttgttccgagaatgtcatgttctacatgtggaggttcaccgaatgacgaatacgtacgatccggctaacagttcgccttcacaagtgtaaacggtcaaaggtcttcgttaggactcttttggcaagacaattaattgcgttgtgcctcggtcttccgagcggaatgacctcggttgaagggaacgatgtggaatgttctcttcatcgctactccgtacgtcttcgacttaataaaaccccccgcgatttccactttttaattccaaacatcttcttttctcctatcctcttctgttctcctctattaccccctcttcccttctcatctccatacctccctcaccatggccccatccgccgatcccattcccgcgacgcccgccattgccaacttccctcctccgacccatcccgaatgtctgcgcgttgagcgcagtacgaaggcatttgctagcggagcttattctctcgtggacctccccgcaggtgccgtcttcgccaagatcactacggccactcccggaaagaaagcctacacgagcgtgcaaaccggccgcgacacccacatcgaactcaactccgacctagtctactgcaaccactcatgcgcaccatcgttggtcttcgatatgggtcgcatggaggtgcgggtcgtggacgaccatcctttgaagaaaggtgatgccctcaccttcttctaccccagcaccgagtgggatatggaccagccattccagtgcacctgcggggcaggtgacgggatctgcagaggttggatctccggagccaagaccatgcccgccgaccagttgaacggatactggcttaatggccacatttccgaattgttgaatgagaccaaggccaattgaggggctggcaccccaaattggaggcttatagaactatcgaacaagacacaagatatccaaatatccgatagaaaaatagagattagcgttaagactaaaaaaaaataccacacagacgctctatactttcataacactcccgcgatcattgcaaattgaatcatcctacgtcggtcaacctctttcttcaacatcatcaaacaagtcgccacaataaccgcttcctccagttcaagagactgtgacgcagcctcgtcgatctgcaattcacccccattgcccgccgaagatcgcgacgttccgggcgtccgagcatcgtctccgcgggccagctgtgcaatcctgtggcgctgggtctctttactcttggccttgtcttcccccacggcacgaagaacaatcaaattgactttctgcccatccgcccttctctccttggcatatttccattcaaactgtttacctccaggtatagcaaagcgcattgagcgagaggtccatttccccgcgacagccacttcctcggggctgtcaccagaaggttgaagcaggtgcacaacgggatcccggctcggaccgaacgagtactcagttcggatcagatctccgcgttcggggtgggacagggtcgcattacctgagcaacgtttgtcgcgcgtggagacgtaagcctcggcgccgtctgggttgtagacaaagatctcagtctggcgggatggcagtgggagacggaaagcgcgaatgccttgggcattaatggttagaatgcgcgatgggtagaaagaggatggactctcgataagtgttcttgtcgtgctgttagacctgacagacaaggccgaggagtgaatctccatttccttctgaggatcgagcatggctgtagtgttcattgtccacgtctggatgaccaccgtgtctccatgtatggccgtgtatatatgttcttcccccgatacgacactttcctatttgggctttgggcgacccatggttttcccaaacttaactccatttcttggcgctcgtgctccatgacgtcggagatcaccacttccttccttctctcattcgctacttctctcgctgaccatgtctggacttgctgagcctcactcgtatagcctcttttgtagttcctacgagtcccaaggcgaaagatacgatctcatgaccttggctcgaacgagaaccttctattctggtggatgggcagcgatgataatgtctgtcgcctcccaatacgaactgccgtcacccggtagatattctgggccgacttacttcgcaattgcgatcagcaagtccgccaagctcctttctacctttctacaacttcagaagagaacagtgaatttgatctccgatctcttgacgcccccttcctaatggggtatttcggacgaggatccactcccaacagtcctagcactcgattggtgtccacacattacgcctattattggtttccgcttgtcagtcgctaaccggcggtctcttccatccaactgggcttgtggtttagtggtataatactcccttagcatgggagtggtccggggttcgattccccgcgagtccatatttttgcttttgctatgttcattttgttcagctcatgaccattcggctattttggcatatctatatacatctttcatctttctattatttttatcttccggctggcaacaatgccgctgtatctacattccaatcacactcgggcccaaacctcttgagccgtcagcagtgtactcaaaaccatggtcgatccaaccaccacgtccccggtgggcatccagcccaaaagctccaacgggatgagcaaatcacagccatctaccacgatctgcttgacccgggcagaggtaacagttgattttaccggggtcttctcggaagcgatcttccggttctttctcttgccattcttcttagaaggctgctccgcgggactgacaagcagtgcccaaatggcttctgcaacagagaaagagagcgcatataaccaaaacgtattggcttggttcatgacaggatcattccaggtcactgcgtagacgcccattgcatgaagctagccttcgtcagtcctattcacggaggaagaaggaacagcagtaaataacataccgtggtcaggtcttccaggacaaagtataggccaaagcaagtgcatttggctagttcaagcagtccagccacagaaccgaagccatccttgcccagcaacgccaacatccgctggaaggagtcaatgaacccaaagaagcggaaatatctccgcgctacgcaacaaacccagtatcagtatatataacagtatatatctatcaatccaatatagaattcaacttactcagtgccaattgcagcttgaccgtggtcaattgcacggccaggacattgctcacggtgagtgctgcgaccacctgcgacacgcattggatcagacgaagggtcttttcaagaccagcgcccgatttgacaaagcgagaaaagtgttggatcatcgttgtcgcactgccacggactctggggacagtatactcttgtgggataggggtggaaattatgtgtcaaggcttggaagtgggctaatttcacttgcactagtaaagttgcttattcagcctttgcatgttcgaagattagtatgggttaactttacgtgtagtcggctattgattgttgtatcgaatagttcatatgggtattctgagcatgatcgaagttagctggtggttgtggttgcatgctggagatatatatagagcgacaagtccagcactacaaaaaatttacaaaaaatttacttgaaattgaaacaattgacaagcaaataagacaatgctcgcaaaatagtacgttgatatcagtcctcagccattcactcgagcaggttcatcaaaccacccactcgacaatagttccaagtctgctctaccgtcctttgccgcccgagatatcctgacccagacgatatccaccaaccttctcccactccactttctgtcgtgtaatgggaagctgcctccggagacccttgaatacgccctcggatgtctgaacaaacgcccgattcagcgcttcctggtaatcgcgctcggccgcagcaatccgtgaaacaatcgactcggcggacacggaagggatgggaatgctgataggcttagtagtattgagggccacattgccatcttcgtagtagtgcacgtcaacgtggatgttgccagtcagggtagaggacgaggaggagacggggagttggtaaattgcgcggaaacgaccattcctattgtcctagaacagacaatcctccccagaaggggaagcgtccataacgattagcttcccaagatattaattgtagagatgtaaccacccaccagaagttgttgggggagtatcggttggcgaccaagacgatggcgacggcagagtcattctcaatagggtagacaccatacgagcagttggggtagtgttcgcgggcatgaacaccgaacgacttgagtagcgatttgctaaacacggtaagcggagtaccaccaagacttcagccgggatcattccttacatcaagtcggcgtgctctgactccaatgcgtatgattgtgctgccgaggctgtctattgccatggtgcaaacccgtaagccttcaatgtatcagcccagttggtcaggcgaaacctacctgtgtggtgtggtcgatctcaaacgaggtttggctctcagggtcgaagtagcggttgtcttcgagctcgttaaattcactaacaatgaccttcccagcaaacttattagctccaccgcagacatagttgactcccaagcgacacccacctcctgacttgatcctggcaatttcaccgttgcgagctgcgcctcgttgtaccgtttgaatgcgggtagaagagaaggaatgatatcctcgccctcggaagttaaggcttgcacatctaatcaagtagtagggattagcaccgtccatgtagatgccgggattgcggggatcgggataggcagcgtagggctaagagggcgatttaccggcgacaacatctgcgagctgaagaaaacatgtcagtgatcattcccaagcttcaggcagacgttgaccaggggagtgggggatcctggatcattgttgtgcatacctctcctggcggggcaccctcgatgaaggaggatgccaattcaacagtggaagccatggcgtaggaaaatacgatcggagtatttgatgttgagcagagcaagaggttcaagagcaatccaagtcctcgagtaattctagagctgggaaatggtgattgtctagagtctctgcggagagaaagacagctgtcggaggcggagagcgataagcacgtggcctactatacatccaagactatgtgcgtatggacatcaacattctgtaacgtgaagtgattcgtaaaataatgtgccaggtatctgaaaactcgctggaataacgaatgtgtatcttgcttcaaaatatccatatccaaataacaccatgctcttaaaacctttccagaaaaaaaaacaaaattctcgagcgctaacgaataatatcaaattccgcatcgctgtaataagagctgttttcaatcaatgctcatattcataaagccatcgctggcttcggtcatcccttgcaggccgacgcgtttcgcacctccagcatgagcaatcggtcgattgcccacatcagaactgagtcgttcagagaacggtggcccgaggcccggctttggcggcggaccccagatgtttgggcccgtgtcactgatattatgggagtgggtcatcaccggactactctgagcactcacgctgggtgaaacagcccggcgcttgaaaagattaggatcgaagtcatcgtcacgacgccgcttgcgacatatctctccaatacttggcatacccggagcatggggcgtggaagagcgggaacgctgcttgaaagattccgcggtgacagagcccatggtcgtagacggagtcatatccataaacatatcttcatctgccacagacgagggacctccctgacgaaccgggggtggggttcggtatcgtccatcaaacgagttccaaaactcgaggccacccgagttgcgactggcttgcttgccaaaagtatccgtagatcctgtgtccattcccactctgaccgccggatcttctgttgccgtcgaatccaatgaggtcgagggccgcaatgatgggaattcgccgagtgcaggggtgggctcaggttcggtgtcgcggacttgccggaccacttctgcttctcgtttcatatcgctatcaactggagcaccctcctccatcagagcagcacgaatgcgcgcaaaggtcttggttttgggctgttactgtagttagcttctagaccactgaattaaaggcacccacttacaagtaagctcccacgtcgggtcaccgcacgacggattacccccagtggacctccaccttccggacgtggagtgggaattgggcttccgcttcgcgtcgtgcgactctcactatcgtcgctcatatcggacaaacgtaggtcgcgtgtgccaaagctgagactctctctgcgtgaatgcgcagtctgccgtggagcaaaataaccactagagtgctcgacactcttcatgatgggcggagagtgaggggtaggactaggtttcgtactgtttccactcgcactgctagagctgtggcgactacggcctttgcgaaagcgcgcgcgttggaaactcatcaagctggcggcagcttgtgagtaccctcccatccagtcgttgccagggctctgcatattgctggcaaacggactcggcgcacttatgcgagtcgcctgcggcgtattgatcataacatcgtcgcgatcagccatggactcatcctcttcctcgctactacttgtgtccgactctatcatattcacactcgacatggagcttgagattgttgcacggtccgccggacctgatgttgaaaaaggcggaccggatgtcgctccaagcgatccgcgtcgctggggtattgccatgccccgccctccaacggtgggagatgaatctggggacgactcggctagggtggaatggtggagattcgtacatgcgcgtgagaagtcgaggccccgagatcgtcgagggagaacagatcccggagatccgtagatatgtgatgggtcaagtttaggagagagaggggcgcagttcgtaagtgatgacacggcgggtttggaaggcaagtttagcgagaggtttgaataagatgcatttgatcttcgaggtgttgcggggagaacgggtatcgcattgtcgtctttgcttgatgcccgactgagatcaccagtggatggttgagtggaggatgtaggtctggaagcatcggataatgaacgcgacttgggagaacgcgacggttcaagttggtgttctagatcagtttcatggggttgagataattgttgactgagcttgctttcaaacccgtgggctgatgtactgcgccctggcgctggaggtcgcacctgcgccatattcaagtcactttggtctgatatggcgataaagagcaagggtgcacgttgaagggcatcatttgtcggcaccgaggcagggaaatccggtcaattccacaagtaatgcccggagagcacatgcgctgtggttaatgacagaatatccacagtattcggatcgaggcgaggtctacattgcattgcaagtcgctggctctgagcggttaacgagatcagatgacgtgcgctaacccgatccggccaagtcgcttctgttacggagtagtgacctacattatacaatcgtatacttcctatgtgctacacaactgaacagagaaatatgaaatcgatagttcaatgctttcgaatgaacgaacagacattccacatgctcattctttctcatgccctcacgccagactcatggcattgctgattggcaccacatgccattcccaatcattgcattgattttgcagaacgctccccttgatcaaatccgaatcgcgtgtctgccatagcttagtgatcactgcccgtgttctagcaatgttcgagatcgttgaatcggccattgttgccagggaacgtagcacaatcgctcgtcccgactttgattccatttccgattccgggaagagctcatcgtcagatggatcaagctccacggctgccacaaagactggccatgtcacattgactagcgatttacggccaaggaggtccgatatgagtcgcagaatctggcgcacataagtcttcaccaaaggtgtggcgggaccagccccgtacagagagcaatgtaagtaaagcattgcagccagccgcttagcatctgcaaccagtccaagaatttcgtcagccttccccatctcttggactaagttctctagttggcgttcaagggaggctgcacgtagtgagaacgacgccttgtccgcatcagacgtatgttgtctccttgttcgactcatatctgtgattttggcgaggattgacaccaattcagggctgcatcccatccaaagatcgatgttgtgttcgtccggtttccagtagtcggtaccaaacaagacctctttggcacaggcggttcggcccatgacatcctggaaggcaaaaaattgctctgcaaagctcgtcacaggatccgatggggctgttgactgcaataatgtcatttgctgttttcttcgcaattggattaagtcgttggcgcctttgagatggatgatccattgttgatcacacttgtcgactatctcgtaaagacatagcatgatcatgataaccagtacttcggggtccatggagcatgtcaagcttccctctgacgagagacgttgacgaaggtccctcagagtctctgatttataacgcaggccgattgcactatagcttggattgagccttgaccagtggcatgcgcccaatgcttggatggccttgaaaagcgtaggagaagccgataaacacaatggcagaatcacagagacaaacggcgaagataatgtggagctggcggttgtgcgagggcacacttgttgaagatagtaatcaaacagctctccgtgcccagatttggatagctctggaaatagcgcaagagacggagggaggctggtgttgaaattcatgctaaccccgctgagatgtgagaagttttgtaaccaggaccatatttggtggtttctggaagatggtgagtttgagcattgggtaactgaaatcaatgcattccactcgtcgaagtcaacgttcacttcgtctgggtgtgcaaaagttgacacaccgctgtttatgaagccccaagggctaatggttggcactgggcaccactcgtgcgtttccgaaagcgagccgtatgtaggttgatttgcgccggttttgttccaaacacctgcacgcccaaaagccactccccgactgatgaattccgattcccatttcaaaactagattcttcgtacatggaaatcctttctcctggcagcgtgtgcaaaggggctttttggtgtcacatcggacacgactcgcccgacactctttgcaaccatcgcgagatcgggtcttcaccggacctgtgcggtctgcagcttttcttcgtggcatacgagttccgtatatataaacttcacatggtatgaaccagcctgggccaaaaatagtatgtgaggtgggtagttggagttggtaaagaaaattgggggtggcggataagcgttggccgccccgccgaatctccaactgattttcgactgtcactcctatatccgtatactatgatgatgatgtgtataggttacatggaaatagtttgaacattatccctaagcgtgattctttttccactctgccgcacactcgccaaatgtcacaaattcaacctcccgctgtttgagccacgaaatcattcgatcaatcatcccaaccacatgagccattccactagtatctgggtgcagcaccaaaggaaaaacaaagccttgctcggaatcttcctcgattgatttttcgagagcctcactgtaaaggaactcaaaccgcgacttccaattttgctcaatggtgatcggactaacgaacccgtgcgagttttcggccgctggaagaaactgcattggagtcatgtcctccatataccaattgcacggaatttcaaccaaactccgcggagttctggctgcaggagcggggaggggcttcatccaagtagaagcagacttggaaggcgagaagtcaatggccttgggctctgacattcgagggacaaagtacaacgccgaatcatgatgcgtgagggatgaatctgtctgaattcagtttcctgatagtcacatataatatgagcaaagtcgtataccgtataaaaatccaaactcttctagaacttgaatggtgtgtgttcgcaactgatataatggtgctctccatcctcgaggttgctttccagtcaagtcggttgccagctgcacacatttggcgatgacctctctctcctgtgactcagtcatttgactggagccctcgtgcgcatatccatggcaaccgatttcagcgcccgattgaacaattgctttggtctctgctgggaatgattccattgaatgaccggggacaaaccaagtcaccgaggaactaattccatgtttcttaaagagacgcaataagcgtggcactccgacttgagctgcgaaaaagccactgctataatcggccagattggttgtagccgaagcaccagtccctaggaagcccgagacggcatcgaaatccacggagagtagaatttggacttttggtttcctggaagtcattggaagtgaatttgtaattttctaagtagtgcaaaggtccaggtccaggctaaggggttatcaaatgacaagcagacgaagttcaagccccgaaccccagaaggaaagacgacccgacacgtggatccaccccgccatagagtgcaacccttgagaactccaacctttgccttatcaattcactttcggagaacaacatgctgttaacgccgattcaacaagtctactcttgttatcctcttgacttgacacagcaacatctaaactcgggtttcccgtaaagaagttgaccggtttgagaccaaccgtcatcttttcagagggcatcactggccaatcctcgattctcggattgtgcgtggatccaaatgtgtgccaaataacaatgtcttcatttcgcactgttgacttggagtccgggtcctttctccgctgagaaatggctgagtcgattccttcgccgccaagggattgcatagtatgttttccggccgggaaaagctcgtcatcgttataacgggtgatccagattgcatggtttccatattcagatcgctttgcatggaaagactctggatgggccagtagcagttggctatagcatggaacaattttgaatccaatcggcgtaccggtgataggattgactttcgcctcattgatgatcttgaacgtgcgattcttgttaaaatcaagatctagccctccctcctctgtcacaatccttgaatgtgttgtgtacccgaccccgaacggatttcggacagatgggtcgttaaagggcaaagggttggactcttcaacctgcaacgagtttgcaactccatcaatcgcaggatcgatacggagagagaacaagtgttggtgatatggcgcaaggacacccggagcaacaatggtgccatatccaacttcgtcaccgatgttgatgggactggtagacaagatcccagtggcccggacttcataatgaatcgaagcatcttggccaaagtggaaagcaaagatatactcataattgctgaccgtgatgatggtctgcagcactaggatacgtgatctgaccaccgcggcatttcccgtacggaagtttgtgtgcttccataaaatcccatcgtcttgctcatgacagcagatgacattgggcaatttcaagggttcccccgaggaagtgttgtgccatccgtcaaaatacttgatcagtcccaggcaatcacatccaagcgataagttgtttgcgttgatcccagccccgtcgttcccaaggtcaaatgcagctttgcgtggatacggagcacgaggatccccgtatggcacaaacatctctgccaatgacagccggtagaagagactccgaccgtcatagcggatgtcatgcaacgtgagaccctcacggtaattgaagcccacgcgcatagtccatttctcccaggtcaataggtttccgtgtgacttgaaggaaaccccttctggctggacaacctggtagggcttggtggttgtgcgcggtggtggtcgcagactgggatggtattcactcatatcagtgggatggatcttgcaggggtcgtacagccgtgcttcttcatgaacactctcgctcgcagacgaaggtaaatggtagaccttggtcaccctgagctgctcagagacctccgcacacaagtcaagtggatatgcgtaatagttggcgtcgggattgtccactagtcgcatataaaaccaacactattcatctatgttagctgggattgagatattgcgaatcttatcagacatgtactgaccatgctagtccgttccgacatgtcgttcatgccatcagtggcataagcccacggttcgacaacgaccgaagcccctcgaggtaacctcaactttccaatttcattttgtaccctctcgtctgccatacaagcattctcaacatctttcatataagccgagtcaatgaaggagtgttttcccacaagggtctcttgttgaatgacaacactccggtccagatcaactacaagctcggtgagttcatttggccccgagtcgccacgaacgaccacttggatgtgagcgatacgaccaggtcgggagacttgaggctggtgaagatgttctctctctaagaatactatcatctcctgcttcggtggctctttcaaggtgatgaagcgaaagttgaagcttttttcatgaagtagctcttggacaacttttgcggcctacaatatggttgatacgacattcaacttttgtttaattaaaacgacttgacttaccttggtaatttcctggggcacaagaggatcaaaagggtgcgtatcagacataatggaagtatctaagaggtgaacgaggataataaagacagcgtgataaacctgggcttttataagttgaactgcaagatatatcagccaaccagtcacagacaagaccagataacgcaatgcatgatattcgctaagatataagaataaccggaaagatcggctggtcaatcgctaaggtaaagaatagccggaatatcttcacctccaaaggttagaacggaaatagacctctatgtatcataggaaggtaagcactagagcccatagtatattataatcacacgaatcaaaactcacttgaagccccaaatatatcagtgagatgtttggggattttcctgttcggcttatctcctcttttccccgcctcaactcttttcttcctctcgccaacctgtatattcaaaacatggcttcaactcgcaccattctggtcttccagcatgatgccagtctccatattcttgaaacaaccgtgacggccattttccctttcaaggacctcgaagaatccgatcgtctactcttcaaagacgccagcgaggaacaccatgtcattgtcaccgagaagactattttccacccccaaggcggcggtcagccctccgacacgggcgtattaaaaggcccatctggcactttcacagtcacggctgttcgcacggatgccaagggacaggtgcttcacctcggtctcttcgaggactcgtcatccgctttcaacaaaggcgagaccgttgagcaggcaattgatgtggaaaaacgtcaactatattcccgtttgcatactgcaggccacgtcctaggcgcatcagtccgacatcttttggagaaagagattgagaactttgatgaactgaaagcctcacatttccccgactctgcagcatgcgagtttcaaggctcaattgaagggaaatggaaggaccctatccagaacaagctggatgaatatatcgccgccaagatgcctgtccaaatcgaatggtgggatgaagaggatttccggtcgcgtggactggagcgattgattcctgaccgcagcttggtgcctgcaggtgaaaagtctcgtgtggtcaacatcgtcggtgctgaagtgtacccttgcggaggcacgcatgtcgatacgacagatttgtgtggacctgtgacggtcaagaagatttcgagaaagcaagggaactcacgagttagctatgtggtgaaatgatgttgtttcactggttcggcttttgggaataccatatagacaaggagtgagcgacccaatagaccaaaataatagatgttttgactagacctcatctcgaatcactttccacctcggcgatatgttacggaaaagttctacattacatgtgagagcaatgggaggcctatgttgttacctttcagatgtctaaataagggcccaacagcaaatgtccctgatggtgcgagtgaatactccagggtagaaaaatcatattatgcctaaaagtcagcgctagattcatcgagatggctctatctcctggagctgatagccttcctccgagggatcagcgcgtgaaataaagggccgcgcaagagcctcctcatcatcgaatttagcaaagccatcgggtccagcaatatcagctttgtcataaggaacgtcacacatgaccgaccgcagcggtggatagtagcgacggtatgaaaaccaggctatcagcatgcccaagagtcctccacacgtcacatcatatacatcatgccgataatcggccagacgggacagggcgaccatcaaagcacacaacaaggggaaaaacccaagtaaacagcgtccaagatccgttcgaggacggaaaacatgcatttgaccacacaagaagctataaagtgacgattgttagatggagtgtcccagcgctgcgcatcagaatcacttacagatataaatagcccagcccgccaaaagagaagctgctatgcccactagggaagctcctccatccctcttgtagaatgtgctggttcgattctgtgcagacagtccatgcgaccagcgcattgttcgatgtacctcgggagggtttgcagcgcgataacaagtccggacgtggtctccccgctgcattttttattatgtccgtcaggaacgaggtcaacatcaaagccacgaatagtccgagtactgtcacttgcgtcttatgcacaccggcgcgaaatgttgcggaccaggcgagaatcaccaaaaaaggaatcagaccagcgaagatgaccgaccacacttttactccggttagaaacaagtgaagcagactgcatcattggcaattgacttacaaacaggaactcgttcgtggacagcgaacgggtactgaatggctttgttatccagcgaaaacatgcgatggaacgggttcacgaataattgaatctattcatgtattaaaaatgtgcagatccatgatttagatcgtttgcgacttaccagtacccatcctgctactagaaaccccaatgcgatatagtcggcggcataggtgcgttgcgcaaagcgagctgcagcaccagcgagtccaacacgttgtagaatcggggtcgacccgttccccgaaccattgtgaggcatcctgcacaactgccgaggacgccagagagatcttcagatcttgactgggcgcatgtcgagattggaaaaaggtcaagttgacattcgacacattgcggaagcacagaccacgtcaccgctccgtcttccaaacaactcggagaaacttcaactctgctcacttggctcaatttctttctcctttctcacatctcctaccctcgtgctagtcggtatggccgatgagagccaacaacgagctgtgaccacggcatttgcgcccccgccgcccttatggaaacacttcacgcgtgagaatatcgacaagctggaacagatcaaagctgaagcttccaagggcgaggatggacggttgaacaagcacaagcagtggtccgcagctgaattgcgcgctctggagctcccctcagagctccggtacctagtgccgcccgacatccccgaaggacaatacagcgtctttggcgagttgcaaaccgttcgttcccctacatctgagctctgcgccggacaatactgactctgaaatagctgtctacaacattgccgtcattacaagagcaaggcatcgaacaactctacccagaaccccccgcagccggtaccgaccagaactcgcagccatcaccccctctcaatcacgcatactaccttctcaagatcagcaagtccctgctccttaatttcctagagttcaccggtatcctatcggtttcgccggaacaattcgaatccaaggtcgaagacctgcgcaacttattcatcaatgcacaccaccttctcaacctctaccgtccacaccaagcgcgcgaatcactcatcatgatgatggaagagcagctcaaccacagccgagaggaaatgaagcaaatggacaaggtcaaagcggaggttgagagtgtactagagcagctgcaagcggagggcagccgcatggctactactgggtcaggagacgataccgaccaggccaaagcgctgaaagaaaaggccgatgagcactctcggctgatctgggctctactcgacaaagaaaactgaatccagcaacgggctggtttctctgaatctgaacagtattgccttctccgagtcgaacgactgaaccattcctgcgttacgtgtttaaatgtgacattgtttcgaaggtcagcttcgttgaaaagcctaccacggaggaatctcgaatcgagtattcatcagcatccaacaaatcgtccctcgggttctctatccaggtctcatgggcacgcaatgctcactgggctgtcaaatatgatgtgtcgatggaaggatcgcgcgcttcgtatcatccaaggcagatattgaaccacgccaatatcttggggacattccgatgttctagcaacctgctatcaagggcgcctcgttttagaatactgaactatctaagaccggcactctcgaagtcccattaaaccactcgagaggccaacaacatgccggttttcgtgaatgtctgccggagcttcttgcttacaactacaggcagtatcatatatcgcatatcattatattgtacactggtctgaccctttctaccgaatgcaatgcaaatgactgctcttccttctacattattattttgtcaattctaagtaccgtagccaataaactcctcacgctaaagtagccaatgagtgaaataacaataacaaaatgcaaatcaatgagaagcggcgcgttgctccgcccaggccttgtcaatggcacattcggccagtcgcttcaactccacaatgaaatcggcgaccaatttgaaatggccaagttcagttgcaggtagtttccgcgagaaaatacgctcaatcatgaccgtggcgacattcaatcggcccaggtcttcacgcgaatgtggatccaatgggttctgaagaatactgcagaagatggtgagcaatgcggacatggggtagaagatcagagtcctaggaggataagcttgggttccagtacatagcatgacgaaaatcacataccagaaaaccccatcgactaccacatgttctgccgcctcgaggtaacatagacttgatcgactggcttctaccgaaagcgccatacttgaactcaccccatccatcataccgctttgtccttgcatccacgctttacatcttccactcgcttgatggatgatggtcatgcataggtgatagttcagacgcagcatgacggtgtgcatacgcatgttcggatccgaggtctcggaagaaaatgacatggttggacgccatctaggagggactgatagccgccattcttctagcgcgtcatcgagttctcggattgacttgagcagctcggcgtctgatttttggagacagctgactgaatatagctctcgatgggcccgggctttgatgatgctcaggcgcaagtcgaatggaaatactggaccgtaccatgggacttcttcgttttccacgtccaagaatgctcgatcgagatatcccggaggtagtgtcagatcacaattttcgtcagtgatggtaggcggctgacccgtgcgcagtgcaagatccttatcaatcgtgtagcaaatccagaagatattccgtagttgtgaatgctcttgctggctgcgctcatccgtcgagatggcctgaccgtcaagccggttgccacccagcatgaaaatgagtcgcgcagcaagcgccgcataatagttggtggtccgcatatttcccgaagataattcgaagagagtctatgttcatcggttagttatcgaaattatacactagagtagctcatttaccaatatggtaacagcctgcgctgcgtccagactggcagactcctgtaatacttgcggcataaagaactttgccttggtagcaagtagatcatgatcgattgcagccgtcgcagtagtcgtgttgacaatgtgcttgacgtcagggagacgagaaacaaaggtaagaaatgcaatgacacaaactctggcgctagcctggccatatctgaaggtagacagcgaatgactgtaagctgttcggatggtttcttcaaaaagctccgggtctataacaggaaagatgcgccgcatcacgttggagctcttatatgcctgaaagtacacctgcattgttccccagtcgggaagttcatagggattggaagtgttcatgttcatgttcatcaaaaccgagttcaaggtctgtccgcgctccttatcccaaggcgctcgggctggactaagtttatcaattgaaacgtgctgtccggtgcgagcctcgatccattcctgtccttcgggaaagaggaacggcgtgccagtgagtaaactgatgacacccaactctttgcccgcaaagtgaactcgcactgacgatgagtctggaagctgagtgttacttggggagctgctggccgtcgtattgacttcgaaagatcgaggcgaatctccaggcacttttgccaattagtttcggggtacttcttaggcctgcatattgaagaggcactaaccagatatttgatcacccagtagattctctgcaagaagctgctcgatgcgactaattcgctccgatagtcgtgaaactttggggcgtcttatcttcgacgtcagacacatagaagaacaagctcgagatacagactcaccccccctcgtcgtcccttttccttttcctctgtactactttgtcgaatgtgcagggaatattatggtggctgcaccaattacactgcggaattgcagcatcacatttgatctaggaccagtttagacgggatcgagagttgacgatgaacgatctacctttcttttgtaacaggaatcacaggcacgagcagtgcgtgtccgtggctgatccgaggcattagatccatgatccattgtatagttgagatgtcttcagcaaaaaataagctcaaaggatgtgtcggtggacatggctgggtccgaaagccgctgacaaaatagccgctgactcagccacgtcatgccgaggtccatgagacgaagtgatagagccattgatgtcaattagtttggatagtatttatatgtagaattccggcttggatcgctagccctactaggggcggttgatattcgaagacgagtgttcagttttgaaaccccgatcgggtgaaaagggtattcaaccagctgccgagaagctgtttttgattgtctctgatttagaagcttcaattcgtacggcagggtatgcttcgagaaagtcaagtttatcaatatggttgatcccatgccgcattttcgttgcaaccaaccgaccgtacgtccgtttggagaccgcaaaacagccgatatcgagtggttggctgctataatttaaagctatagaatgaagttataagacatcgcatttactatgtgttttgggtgggcggctcgcttggaaattacgtcgtccaaggacaaaaaaacagattccctgtatattttccttgtcttgccctctccacatgcgatcagaccatcgccaccggaatccccaaacaataaaacacgtccaagctcgagggagatgaatggcagctcacatcacagtgcatatgcagaaatcgcactcttcatcgccgcagtcacagccaaagcatggcttagagaccgatttgatgggctttgtaatggagctaccggagctgctggaaggaaggatgcagtcgaatgggattgaaatagaggtgacggccatggtggataaaggcttggatctattggagattgtcagtcaagtccgagcgagaaaacaaaaagccggtaggttagaaagcacagaacatcgtacctgcaaaaacaaacacgggtatagggctttaagcagtgggttgggagaaagggggaagatgaaaaagttaggcgacaggcagtcggttattaaatgttcccacttagacctcgttaactcccaagaacaagagatacgagcctaagagttgttaggccataacatcttttattatctgaatcaaaatggacccgccacacacgtcacgggaatatagggatattatgccaacataggattgagtctataagcgcacgagttagaataattcagcaaagtagtagagaaagaaagatactttgccctctaattagtatggcttcactctgtaataacaccgtcttcatcccattcagataaccgaggcagtggttcgctactagtctagtagcaagaagcatcatttacatgggaatctctcagtcacaggagtgggcgacgtagcttgaagttctctccactcgcacctcttcgtgaacacgaataccgtcattactgcttccatactgacccaccagaatctcttcatcgctccgactataacgaggtttgacatacttgccctctgagctctccgaatgcgatccatgaacgatggtgcgatataacgggcggacggtggggatgccaacgcagataagagtgacagccagttcaacggcggaccagattatgaggttaacagtgtcctctagaaaagggattggtggcattggatctagacgcgaggaggtggcttaccggtgtagttggagctggctaacccgcccaggtcaatagttcggataattccgcaaatgcaggctctagaaacgaggatgactatgtatccatgaagaatcggatgtgatacacacatgaagcccagactcaagctgatcgcgatagacatcttttccttgaatttcatgttaagattccaaatgaagatccacggaagaagagtaaaataaaagtccacggcagcacaccagcctagattttatcaatatcagtatagacatctcatacaaacagtcgaagagatatcgaacatacatccaagcataacggagaaaggggtgactgggacaacagtataccctgggacgcgatgatcccatatagatcgagacggaacacgctggaaccaaaagataagggcggtcatcatcgacacaatcgacaagctgatcatcgaggtccatattgaaatacgatgccatcgcttgataacaatacaaagcaggaaagttcccagcgagatcttcgcaatcgccattcctaatatggcaaatgtttttccaatcatttcgttatacacggccttcacagctgagtccttctccaaggtatctatcgattgtccgaatccatgcacaccagcaatcgtgagaaagacagtgtaaacgagtaggaatacctataattaggtcagcgttctatcataggtctagtcttgggtgctttgcgaatgggaaaatacaccttaggccaaattgaagatatggtcatccctcacgagtgctttcacaatatggactcggatgtagagcctgagcaggaccagaataaaagagagcaaagtcattgcccacagcacggaaatggcacgaacgcctttcccagccaacatcttccagattcagaaagccggttaaatcagaccaaatgctgcagaacaatagcgcccggggcttgctagattgagagatagagaaactaaacggcattgttgaacaaatagatccttgctctcaatatctcaataagttggaaatagtaaaaaaaggatctccgtgaactacaaggctaaaccatttgaagtcggtacacgcgcggattataatagaacagcgacagctccatgccgctcaatccgttcatttctgcacttgcagggtcgtaattcatataccagcccgttatgtgatagcctatattatttattaaagatcatcgggacgttcaggcttgaaaacggcccgcagcgtagtagcgctccttcgaggagtttgaaaagccaattaggtacttccaattggatattgtatacgaggtactccatatttcgtactttcgtccttttcatgcttttcgctattttgatgggtctatgtgtctttgcgccagcctattcgccaatcgtcggaggatggcccgttcgagcaagtcaattggagttgagtttatcctattggcattaacgagactactttgatgcacagctgagtctaggcccagcaatatggagtatggaggatcttgctatcttcgcttgacaactagccacgttttgattcgcatgcccttatacggagccacatgggatcgacattgtgagagggtatatgcgcatacgcgggctgtctatatattattgtatatcacggatgtttgagggttgaagagtgtatccagctgtcaactctccgtcacatatcattccacgatattaaaagatcgcctttttgcgatgcttgattacgggaatagagatgctgccaccatgcttggctatgcgtttctcatagcccttccagtctggtatttaacgacatatctcctctccccgctacgccgttatcccggtccctttctcgcaggtgagttgcagtatcattcttaagacccctttagcgttccgtattgtcctcttatacctcataggctggacaaacctatggcgtatgttacatgttcgccaaggaaataaccatgttgtcatccacgagctacacaaaaagtacggccccgtggtgcgcattggccctaacgtgctcgacctggatatccccgagttgatcaagacaatttacaatatcaaatcggagtatttaaaggtgtgtatcttactgcaggtggctacttgtcactagtattgatcgtagtctgtgacagaccgagttttatcatggcagtagtgcgaagaacaacggcaagatcatctacaatctcttcagcgagtgcgatcccaagttgcatgcacagcagaagcggcccgtctcgaaacattattccatgactgggattcttccactggagccccatattgatgatatgatttcctacttgtgtcaacgtctggaggagaaattcatcgatggatccaacccaactgaaacgtgcgacttgggcgaatggattgcatattgtaagttcaagcccatcgcatcaatcctttccaagacttataaatcatctagatacctgggatgtggttggcaatgccactttcagccaacccattggatacctggaaaaagggtatgactttgacaagaccctgagtgtcgcgaatgtcgccatggactacttttccctggtgggacaaatgccaattctggatcatttgttagataaaaaccccatctaccgaattggcccgccgtccttcggaaccgtcgccaacatatcaatccagcacctcacggaccggcttcagaacaaggacaccgactaccatgaccccagcaagcccgatttcctggacaaattcatcgaggccaaggagaaattcccagaggtggtggacgactcgcaaatcatctcttacctgatgaataacctggttgcaggagccgacacaacaggcgtcaccattaacgcagcattgtacttctccttgaaacatcctcacgtctgggagcgtctaagaaccgagattcccgcccacgaccataccgctggaaacaaggtggtctccttcaaattcgccaagcagttcccatacctagatgccgtggtacgggaagcaatgagatgtcatcccgcggtcgccatgctcctggagcgatacgtaccagagggtggacttgcccttcccgatggaagcctcgttcctgcagggtcgatcgttggcatgaatccctacattgtagggcgcaatccgtctgtctggggtgaagatgccgaggagttccgtccggagagatggctccgcggtgagtcggagactgaagatgcactccagaaacgtttgcaatcaatgaacaagctcgacctcacttttggcggcggaagccgtatttgtctagggaagcaccttggtctgctggaggtgtttaaggtgattgcgactctcgtgtcacggtacgatatcaaactggctcatccggagaaggattggacgacgcataatagcttttttgtgcgacaggagggtgtcgaggtgaagcttgctcgccggagttgaaacattgtgatctacaagacagggctacataggaaacacagggtacatatgcatgtagctaagacacttttacggaaaaaatccaaagttaaagattcaaagcatgtactcattcacactatatacagcagcaacttttgaggggtttcatcaatcatcgccgcagtgactggggtatcgtctagtcattcgggcttccaagccatccgtctatccattaaaataaatccttttttgttcatcaatccgtaacagagcagtcggtttacagctgctccacccagggagcaacaccgggctgcatctggttcagccacttgacaagctcgataagctcggcccgacgctcatcctccagttgatcctcgtcgctgagaaccgactggaagataggaaggaggctgggggtgagttcacggatggtgacatcctcccacttgtacatttggcagatcatgcggtacaggggctcgttctcctcgtaatcgttcttcaggggaagaatgttgacaagggcaggaagaacatccttggtggggacactatcgcggtaacgcaagatcatgcggctgacacagccagtagcattatcctggagacgcgagacgtccatctgaaggcaggcctcaagacgggtaaggatggcggggatctccttgatgatctcagcctcagcattggagtgctgaatcaaacggccaatggcgtaagcagcattggacttggtttgggagtcctcatcggcgaggcggtgaaggagcagcttcaagaagacaggggtgaagggggtcacggcagcacccatgccgttgatgcactcagcgaggacaccaacagcagtggcgcgctcaagagcctcagtgctaccagcgtagcggaggatggtcttctcgaacaccttccagagctcggcaaagctcgggcccatggcagcggccatgccagagacaacgtccaaggcagtgtcgactacaatccagtcgaactcggaagattcctcaccagcctcgagagtctcctcctcgggtccgaactcgacctggcagatatgctgcttggtgatgatatcagtgaccatctggatcacgttgtgaagcatagtctcgttggcaatgagggcaggaccacagaagcgcaagttctcggccatgttgcggttgatatcggcgacagtggaactattaattatcggtcagcaatcaagtcattgaatcgacagttgataagtaatgaggcaatggtaggagtagatctcagactgtagacttcgccgtttacatcaagtacgcctttggcgcatcaaagtgagctgggttaagcggaaaaaatcatcatagaaatggttgggcaagggaagaaaaaaaaaaaaaaaaaaaagacgggtgacacataccggtcatcttcttcggtccacatcttgacagtggctgtcatgagaatctcaccgaacttctggacctccttggcaggctgaacctgaagggggagaccaggctgccacttgggcatctggccattctcttcggcgatagcaaagagcatagcgtatgagcgatgcagagtgctgatggtgctcttgcgaacaccctcgtaagggtgctcacacaagggcatcacatgctcaatggtcttctcaaagtaaggcaggaaggcgctgcgggtgtgggtgacgaggtcaccgatgacctcaacagcaatctccttctcgagggaaagaggtgtggtggcggtaatgtcatcccactcgtcctcgtcttcgagatcaatatcctcgatatcaccatcatcctcatcgtcagcacttgcgaccttgaccttgcggccattgaaggtaacctcctgtccaacaaggtccttggcagcactgccgagatcaacatcaaggtcgctctcgtcctgctcgatgcaatcgtacagacccttcacgacaccgtcaaggaagggggcgaagtgctcgccgtagaccttggccatggcaccccagaagatgtatgtactctccttgagacgggagtgaccgagatgcaaggcttcctcagtggcacgcatgaggggctcaacgtacggctggtagcgttcaggaccagcggcggcggccatctcacccatggagtcagtgacactggcacggaggtcgagttcatcctcactgtccttgacagcagcaaactcctggaggagatgcatcgactcgtcaaagaatgagaggaaggagtcaccggcagaggaggcgagggagccaagagcaccggcagcaagggccttgatcttgaaatcggggtgcttgaagagattgtgcaggatagggacaagctcggcctggtaaggagaaacatccttctcgtccagaccatcaacaacagcatcaatagcactgataccggccttgataatatcgagtgtagggccttcctcctcgcctttgtactcttgcatggcgctggccaagttctggaagagcaacggcatgaggcgagcgtgctcggaactgaggtcttcaacgagatcctctgcaagacgagcgacagtgtgtaatgaagcctggcgcaccttagggtcctgatcagcaaggagctggaggaccatagggaagatctccttcatctgggtgctgatgaagtcgggggcaccttcaacacacatgccgagggccatgataccagcgcggcggtagtcaggatcggggctgttgaagtactgacccagcgcgttgagcaaggggacaacgacctggctaggaggcaggctctgggagagcatgtcaagtaggccgagagcagaacgggcaggggtgatatcatcatcaccaggagaggcatcgccaagctcggtaacaatttggagagcagtacgggtgagctcctcgccaatacgcataccctgaaccttgagcttgcggtactggatggtctgcatcaggaagctgatggcctgggtgcggacatcctcgtcaacctcagtgttggcagcgatctggttcatcaaaatgaccaggtccttgaggtggacggtcagcaaagcagggtcacaaccaagcagattctggaagacttcgaaagactgcatgatgtgatcctcctcttgcttctcaatggagtccttgagaatagcgaccatggcagggaccaactcttggaaagccttgacgggagcctcatcctcctccgaatccagatgcatagcaagcttgctcaaagacatgagagtgttgatccgaacttcggcgctttcggggtcgcggatggtcttgttgaagaggttgaagaggtcctggaacttctcctcgaagccttcaccgagagtatccaagatggtgaagagaatgtaaatagccacagcgcgctcagcagcgttgccattgttaccagcctgcaggagcaggttgggcaggtcagcccactcgccgtcgttcaaatcaatcttcgcaatagcggagatgatctgagcgatggagtgctggacgagagatgaactctcgcccatggtagagcgaagcaactgttcacgaatctggggtttctggaccgcggggaccttcagccagtgcttggaaacgagtgaacgggactctacggaagagagctggcgcagattctggtcatcatgactagtgcagatctggataaggaagacaagggattcgggcttgttgtagaactccttttgcaagactccggtggcctccttaaggtttccctgggaggctacatgaaggggtcagcgagacgaacatgggcttcgacgttgcaagacgaactcacgatccaggataatctgcaattgctggaggaatcgctgttgatccatgatggaaagggcaatgtagaagattttcaaatggttcttctttcttcctggacgattccagttgccccaggtctctatgagagactcaggccgcaggaacaaagattgagcagtctgtctcagacaaacaactcaaagggggtatcacaaagcaatattgacaggaagcaaaaaaagaaagagagcggaagatgaagaaaaaaagagagtagtgaggggaggagggagaagaaaagagacgagaaaaaaaaaatttaggggagtgggttggttcctgattgggtttagcgcgggaacagttgtcaacaggcgggaatttgggcagagatttttagacgactccatttatatggggttagattggtgtgcatgttgttatattacgatcatggttacagtgagcattcatatcattcatgtcagttgatccttcttgtaaagagcgcaattgggacacgaccaatggtatatcagctatacctaagtaacggtaacctgcatgctgcagaagagtatagagattttccacatcaaagacagaaacatataaaaatcccttcgccctaaaactcctctttcgtccgtcttgtccgatggagagcaaaccgtgctacagcaacaataacaccagttagcaagtgcttggatgtattgacagccgtgcatccggtggtttccagaagacccacacactaacgaagccccaaacagccgaggcatcatttaatattcatcagactcatattcatcatggagtagcgatgagcggtagccacgtgaagcgagattggcctctaggccaccttcggaggcagggtcaaagtagcctaaatatgtcagtagagttctccttattcaatagcgatgggtcaatttgcacgtaccaccgccgccaaagtagctgagagccactggtaagaagatgagagcatgcgtagcagcaaaaatcaccagggctagccaaacccggaagtagtagatctcgaagatcttgcttcgagtaaatgccaggacgcaaactccgagaagttttgtcacggtaataccactgaagacagtcccaccaacattgaccaaggccgcccatgctcgagcgtccttaccacggaattcggcgggcaccttatccatgatgggtcgagcggggaacatgaatgctcgggcaatatgagcacagaactcaacaccaatgccgacacaaatgaccaagttgacaagagataccgcattcaaggagacgccagcgatcgccatagtgccaatgatatcgaccactatcataaccactgtggttgtaatgacagcgcccgtggctatagaccccaatatcacagaggtcaagacgaagatgatggccacggccgacccaagcagggtaccagtaagtcgcacaatggaaacgtattgatcaaagaagatgtagaatttggaatatgggaagacgtcgatatcatgttcccgtgagatgtcatctgcaatccggcgagctgcaatatatgcctcgataaattcattctggctccgaagaggcgtgtggctagtacggaaatgactggcgttgatcgttttatacttgtcatcaatgaccaaagcattgctgtagggcgctttaccaccgagggggcaggatgcatcggtgggagcatcgatccatttttgggcgtaatggacaaattcagatccttccggcattcccgaaagagagatgttccaggcaggaacgcggtcctcgaaacaaagcttgccgttttctttgcaacagtcttgctgggggttcagccaatagaagaaatcatcaatccagctggcggcagagcctgcaagataagaaacattcggacgcttagactcttgctcaagaataaagggaagtgaatactcctcgcaagtggtgaatcgtccacagagctgttgttggtgacttcgttcggtaacattcacattccgagtcacgaaatagaccggaggccctgtgtcaaagtatgaatctaggtcgttgaaatacgaaatcagatacgagtcgctagggagcgcgatacgctgatctaacccaagaggaacctcggggatgaaggctagaccggcagtcaaaagacccaagaaaaatataacaacgccaactttcacccgacgatccaggaggaaaggcgcatagacccgacgaatgaagacctgcaaagtgctctctgcttcctggccatcgtagttctccccagggaagccgaacgaatttgctttgcgtacagtaagacaagggatacagtccgcacggagactctgcacccgtctctggttcagagccaagacggagatgaacatggtgatttgcaggatggcgttaatgaagacagcaccagcggcgtatgcggcaaaattcttgacagcgggcataccaacaaagatgcccagggcaaaggctactgtctccgtcagagcagacaggaagatgctaggtccgattcgaccaacagctcgggcaactcgctcgtcgatttcttcatcgggatggctgatattgactcgctcgaattcgtggacgatcaagaaaatgttgtctactccgactgccaggaccaagaatggaattacttcagcaatgatcaaggtcaccttgacgcccgctgccgagaacagtccgaccgatgcagaaacagacatcaggacaatgatgatcccgacgatccccagtgtaaatttagactgaacaagagcattggatggattggtcagcagagacctccaggtaactgtgaccgagcccagggccattgagacgtagaagaacatgatcaggtaactgatgacaacaatcttcgcatctgtgttggtagacttgttcagttcctgttccaagctgacctcggaattaaaagatacgcgaaggcctcgctcggcagcctcttcttggactaccccgagaacggcctggaaagtgttctcccagtcaatggcttttgcttcttcttctgttccctggtcgtaattatttaccacccaggtcacaatgagtgcctgggcatccagaacattccctgtgtcatcatatccaccaagaatcatttcgggcttgaggggctgcgagaaatcggggagacagctagggtcgccaggcgactttgtgcagtggctaagtctgtccttccatgtatctgggtcaaggtttgagacggaaccgccgaaatacccagtgaaggattgcacgacacaagcttctccagtcggcttgaaacaaacgtcatcgaaattgagagcctggtccaacgagatcacgcgtcgcacacgagattcgacgtcaaaccaccaagtaagggtttcgtagtccaagagcggacgtgagtcattacctgggcggttattcaccaaaaatgcctgctcggctcggaagaatggaccaaagctctgatcgaagaaatccttctcctgggcggctgcagatgacggactcacccagagttgcaccggatccgtttcaacggtgaaatttagccaccctaggctcagcagcaccactccgatgacgctggagaatattgctattgctgggaaccgcgcacaagcaccaccgattcgatgaaacatagctgacaacacagagttgagcttgtatactccatgtgatctttccatatatcctccacggtgcatgacttccccttcatcttcgtcatcgctgggcgtgggatcttgtagcaaccgcacccgctctggtttgcggaaacggcgttccttgtatgtgacatagctcgcgagagcaatgacaaataatagaaagacggaataaacgagaatgacggcaaacgatagacatggtagaagtcctacatgacatatcttgtggggggagatggcaggcaactccggacacacttccgggcagtcgacacaagaacatcggaatgatttgtcctcgtcattgcaggctttcggctttattgacaaagccttcattccttgcgggtcaggcccagtgggctctgtgtgatagttaatctggaacgggctcccgagaaacttcttatcacctaaaaacttcatgaaatggggagcgtctttcgcaccaccgccgatgaagtcaatggctttcccgcccgaggcaccgttctttacgttcttgcagctatcgtagaagccgttctggtactcctcggaccaaatattgtccaactcggtcacaagtcttttaccagatctgttttcttctgttttggtgacattgatgaaaagggattgatcgggggagcatgtaaaggtacagaatatgttgaagaagttgtctcggcaggcagggcaggacgcgataattccctctgctagtttgaggttactggaaagcgcatcgatctatgggttatcagcatgatagaattataaatatagtgatactatcgttgacgaaaacagaggccgggatctctcacctgttcatctcgacaacagaccggcccttcgctccatttgctgccacacagatttaccaacttttggcgtactgcgtcttctggttgttgcgccaggtcattatctggacagggtagttcacctccaaaaatggattgctttccacaatgacctcgaatagcacaacggcccttttcgtggattttagtttcgccctgtgcaccgacaagggtaggtgcaaaagagcccagcccaacgatcagggcgagagccctaggcaaccgcatcttgtgggaagaatgggtgtggtgcgagaaagaattctttctaccagtcttcaattaagatgcctgggacgggaacactttcaatactggaggttggccatgcactgttcggttcgtgtggggaatgttgcaggccgagctcaggagctggcgcaaggaggagggaatctgaattggaaggacaaccggacgatggagctcaatatcaaaatcggattaaaatcaataatcaagctcgatggctatgatagtaagatagagtgagtaagaggagaataaagcaagcttttagaagttgagtgacgtgaaggcggagacccgcggtacattcgtcccccgcacggtcacgcaacgaacccaagtaccttgtccaggcgctaaccgtcaggcacgatgatgtggctaatatcgtggctcgaatcagattggccgaactgacctctctgttcttggcatctagaacctacgggcaaaatatatttctatgtgattgtaaatataaatatgttctttgtccccgctcaaagagaacgtatgttgtatatacggggatttgagtctacgttataagatatgttattgtaaagacgctcatgatttcattcaataaaaaacagaaatgaccgactccgagccgaaaccgcattctatgaacaggaactccgagtctcaaacaggagagacaaatgtgattgcgtctgcatcgccggtgattcagttagcaatgagaacgaatatgggaagaacccagagagatgttaaaagatatcacatgtgaaaagaaattttgcaagccatttgcccaaggggtatcatcacaatgcaggccaggcaacataaacatgcaacctaatagccgtcatcatcgacctgttggtaaacgtggcgggttcgggtggggtccttgcgcatggtttgtccagagcctgtgaatcccactaaaagatgagcccggttagcatcacagagtagagaaagaatcatttataaggatcccatacctcgtgcattgacaccttcacctgtgcggaacatgctctcctttttgccaaaggcacctttgcctttgcctttagttttggcagcgaaatccttccatttgttcttgccttcttcaagctctttgttcgctttgaccttgcggggaatcttagcggggcgagccattccatcaccggccttgttgggttcgttgcgagcctgggtagctaatgcggggttgatatctgccgcggcggagattacaccggggtgagagagagcggacgagggaggtgccgaactgcctggggttccatcagccttgcgctttcgcgagtcagtgccagagatgggtcggatatccttggctgtcaaattttccacagttgcatatgacttgaaggtgacaaggtacactgggttgtccgatgagccagtgatggagttgattttggccgggtagaagccgtgatcgccggagacccagcgcgcaagaacaatgtcgttcaccgagaaggatacggaagtagtaggtgcagccgtggactcctctgggtgttcagaaggcttctgggaaccattcgccttgaatcggccacccttgggagcaggtttggcgggcgcagctggcttgagttcagcaatctgggtttggagaacggtaatgtattcttcgagttcagtcttaaggctgttgagttcagcattatcagggtctacctccaagcccaatgcgacggtttcaatctaatggttttaagttagtggcgcgtggtgaactggggggatttgccgcaactaacctgagacgtgcattctgtcaggtctttctccaaggaagatacatcagccatgatgagattctgattgatgtgagatagacagtgctattaggaacttgatctgcttgatgtgtatcggtgaagagctgagtggattgcggagaaataatctatctttcttcctgggcccgatcacgtgcattgtacttccgcctttctctccgccctgatagacggttttacgccactgcataaagtacatgtggatctgtacctagtgttcaccttcgttactcgtatgtggtcaagactttaatttgggaagactgggaagactgagcagtacgcagcatatctaattcagtatggtatgatatgcaaacaggcgatgaccctatagtatcatagtatcgaaaacatcgataatccactttctgcagatcgatggggatatatgcatgttaaggtctattagagctatggagtactccgtccaatatgctttatactactttgtatattccctgatttaggggtatgggaaaagtggtaacgtcattgaatggcctgatactccagcatatcggaccggggattggaagacccgggccagacccggcgacataggtacggagtacggagtctaaaagctccatatattgcattgccaagtcaagatgtgagtcagaggagtcaattaactaactaactactagttaactagttagttcgggaacagtgtgtagtatgttgtaggttaattaaacactttagggcttagaagctactcgaagtggagaaaaaaaaagaaaactgatttcaaagcagatacgcctacagccaatcatatcagccacaccactcaccgcccatccctgatcgccctcccccctcttccagtcctccagtcatacaacctcgtccatcgtttctcttggattctgcaactttcacgttggaatcgttgcatatcagcctcgtgtttgctcaagccacacttataccgcaattcgactagcggggaatttgtcctcgcctcaagcccctctcgaaagccgctagaaactcttcttcctctttcccccccctccatatccaatatcgccccccatatttccccccccccccccccccccccctttccttcccnnnnnnnnnnnnnnnnnnnnnnnnnnnnnnnnnnnnnnnnnnnnnnnnnnnnnnnnnnnnnnnnnnnnnnnnnnnnnnnnnnnnnnnnnnnnnnnnnnnnnnnnnnnnnnnnnnnnnnnnnnnnnnnnnnnnnnnnnnnnnnnnnnnnnnnnnnnnnnnnnnnnnnnnnnnnnnnnnnnnnnnnnnnnnnnnnnnnnnnnnnnnnnnnnnnnnnnnnnncccccccaactctggaattttactctcggttcttacttgcgacggatcaagattcaacataatatcggattgccgagattgctcactcacaaatccgaataagttgtgaaacagccgtgaagctatactgcgaggattgaatcatcctccaaccctcgtcgtttcacggcatccatcaatatctgttacgggcgggaggcccggttggactctgtattgaaatccattcatttttcatcacccttgcttttcttgtctctcgtcagcccctctatccattggaagtagaccgtcacaatgggtgattacgaacgataccaacaaggtctttacctttcccccaaccaacaagacctcttactagccgctctatcttccaacaaccccagccaaaagcctcaaagtggctctcccccaatcaagtcctctcagagccccgacgaagatcccccaaacgctcttagcaccgacgatccccatgccaacaatttcggatttggggacgacgaaagcccgttcctggatttcatcccggaggtggacttcgatttccccggctcggctgacttgattggtgacctaccgggattggccgactatgatattggcgggaagcgaaagtctctcgacggcaagtcggacattgaaggggaagaaaccggaaagaaacgtagggaaagtgaggccaagaagcctggtaggaagccactgacttcagagcctactacggtatgccactcttgctgcacgcggaagttgctgggactagagtcgtgaactgacgtaattgagcagaagcgcaaggcccaaaaccgagccgcccagcgagccttccgcgaacgcaaggagaagcacttgaaggatctggaggagtcggtggagaagctgcaaaggacatccgaaatggcaaaccaggagaatggcttgctgcgtgcccaggtcgagcggttgcaggtcgagctgcgtgagtaccgaaagcgcctttcctggatggcctcgggatcaggaaacgccatctcggctatgagctcgaattctattccgggtgcccatgccaaaggggcctatggcctccaaaacaacgagtttctcttcgatttccccaagtttggcgatttgcctgggggtcatctcttcaacggaccggccaacaagaaagatcaatccaaatccaatgacaacgtccctcgggcacctggtgtcttgggtcgcgacagtctgaacagtccctcgtctcgatcgaattcgctttcacagtcgaacaaatccaagtccaccggaacttccaccaacgctacttctaccaaatcgccttactcgggcttcaagccttccgcaaatgataaatctactacttcggaaaattctccatcgtcttcctccgactcgcaccagagccagatgctgtcgtcaaacgggacgtccccagaaccaagcatgaactcttctccaaatgggcagtaccgtgagctagggccaggggactcttgtggcgggcatgtcaccaccgatggagagaaatccttctgtgaacaacttggtatggcttgtggcaacatcagaaatcccatcccagcggtccgggatagcaggtccaaatctcagagtgtttcaagcggccaaccaaccccgatcgatggtccagccgggggcgaaggctctcaggatcttggaattgattggctggcgcatcagaatggcgggcagttcgatccagtgctctttggcgattggcgagagccccaggatgctgtgctctctcaggatttcggctctttcttcaatgaagcattccccctgccggacttgggtagtccctcccacaatttgtccgaggtcgccactgacgcggccgcacccaagaagaacctcatttctcagattgataacaagctcgaggaagatgaggtcgttccaggcgaagaccagtcgcagatgctgtcatgcacgaagatctggtacgtctatcctcatataagtattcaacagtttatcttcttccagatgactgacttcattttttctctagggatcgtcttcaatctatggaaagattccgcaacggcgagatcgacgttgacaatctctgctccgagcttcgtaccaaggcacgatgttctgagggtggtgtagtcgtgaaccagaatgatgttgatgacattatgggacgagttaagtagcggcttgcttccaggaagctcaccgtcactgccgcccttaaaacaactcatactcgggcttaattcacgattcacggaccaacaccaactcattgatacttgcgctctcttgatttatacgcatacccatcgtcgattgtcatttatgggaggaatcctgcccggcgtcatgaatacaacacaggataaagaggaaaaactcataggagaggagaaataacatcctatttacgggatatctgattttgaaagcgaatttttttgtcgatgcccatagctggcaatctatcagtgccccttctcaaggggacaccacattcctttttttcccctctgctctctttgcaacagtaattgtcatttgatttattttatgcttgttctgattgacaacattgagctatgggagacaccgtctctggccatgagatttcagcaaaaatggaatggcacttcaaatgcctattgtacggaaagggaatatggcgaaattgatatactactttcttttgcagctgggacagaatagccctgctttgcgatgttcaatgtacttttctttttttgtacacaatctattgaatggatctcatctctactcgcaattgactcaattccactaacccagcttgattgagcatacggtaataggaagacttgtaggtgcgcaagaatgagtacgaagtagcaatctcgtagatctacaaactccagaagaaggaaagctgtaagggtatcgatgtggtccacggacgtaaaaaataaagtacaaagagaaaagaggtgaaagggtgcattctttttttttcttcttttcttttctgatgatgttttctccatccattcctccctctgcaaacaaaaaaagaaactgtctggagctcaccgaaggactctcacttcggagtccagatcaacgctgcaattagcgtccatgtcccgtgtccctgaccagacctgagaacaaagaacataaaagattgagcgctatcagagtcaaataagggaaaaagaagatttgcaaatgggacaagataaaaaaagacacaaaagaattagagtatcaggtgtgtaagatcgaggcaatgtcaagggccgggggaaaaatatgagacatagaaatttgtatgtcaccgatcaggcgtcgccggatgcgacaggcttgtcgcctgagggggtaggagagtcattagggccgctcttgaagccaccccggcctcctccacgaccaccacggcctcgctcgccagtgccacggccgccgcggccacggccaccgaatccaccacgacgactgccatcgctgtcactggcgctctggtacccacgcggggcggtagtgatgccaccccgggtgctggactgccaagttccggcattgccgacagcagcacgggtgctgcggtcctcgaagaacttgaagttgggcttacgtggctgaccatggggagtggaaccgggcttctttagctcaataggcaagtggtccagagccgccttggcctcttcgacgcccgagaatgtcacaacgtggttatacttgccgagcttttcgatcttggtgatcttcgatctgtcctcctcagagatgaggtcacggacggcctgttcgctttcggcgcttgttacgaaaagagcatttgcgggcttcttttcggcacgtggtgcaggtgattcactcagcttttcgtgcggggcaataccgttagtctcggcagctgcggtcttctcctccccggtgggctgagcagaggcggcaacaggtggctggggggtaatggacttgggaatcacgggaacaggggaggctctcggtcccttctggccctgaggaatgggtgcacgcgcaggaggggcctggccgaactggggagccacgacgggggtccgggctgcgcctgtcggggcgggtgaggcagtggtcgctgggtgaccagtagagacaggttgaggggcaccacctgcctggggtttgccagtgcggtgggcgaagttgaatccttgagcccgcatctctgtcgcgatgcgtccaccttcaacctccaatacgagatatccgaacgccgcatcggccaagttgaagttccacatattcttgaatgcactctcgtcgacttgtccagcggcattaccagcggcaacggggccaccgaatggattaccgccgttggcaatggaaggcatcttgtgaacaacatccagggcattctctagaagagtcttctgtccatcattagaggagatagctgcctcgacctcgatccggaccgtctcccagacatcgttaaatgacgccttagaggcagcaagcttgccacgataatgatccaaagacgggttcacggagaactcattgtacgaggaaccgtagcggaaatgaagaccagcggaaattgaaaaatcggccttgagggtgacggaaagctggttcagcatgccctcgcgggcaggagaagcgtgagtgacaaagatacgagtctcggaggggtcgtagacacgattggcggtgtcgatgagttcgcccatctgcaaaagtgtcgtccacatggtaccttggccgccggcaatagtcgtctttccttcaccattgtcgaaaagcttgtgcatcacgacagcacctcccagacccagcagacggagcttcacaccgccgatatcgagaaggcgcgagttggcctcgtcgataatgtgtagcttatctaccttgtattcacccgagcggaacttctccagcacgcgcacatcttcgcaggcaccccaaactgtgtaaacgggcacatcaagggtgatgcgcttgtccagtagcatagagagctcagagaggggcaattgctcgggcgggaagcgctgcttaatcgactgctgaggagacacctgtgcgatggaccgtttcacgttctcggggaggaggggggaatattgtgccacatgcttcaatgtcctgttcgtagattcgggttagctgatgctgtccagtagatttcggtgcctggcgaggcgaatgtgttgggcagcaaacacgcgccgaaaagcttcagaagaatactcacttgtctgcaattcgctcgagcgaggtgtcatcatagaaaccaaagtcaccggtgtgaatgatgtggtcggcgcgggcctgcttcgcaagctcgttaagcgacttcaagttgcctgttttacgcgtccaattaatattgtgtcactttgccaagaaagacattgccataatgtagttacctcgcacgtctgcaatgcacaagattcgtgtcggaccactctgaatcacacggccattgttggggagaagcggcgtggcaccggggacagggcccgcagccgcaccattcgaaatagggtagccttgagcaccgaagttggggcggggctataagttaaaaggagtgatgatattagccaagctctccaaaatctcaagatatgacattcatcgcgattagaagctggggtgcgcaaatgcgaggggaggtaaggttagggagccacctacagaagccatgggggtgttgaattagatcgatgtgaatggtaggatgtgaagtgtagaaaaggatgaaggtggtgtcgaggggaaaaagatgtcgaggattcactttctcatcgatgaagcagcaggcgtgacatgaagattaggtaagccgcccctgggtggacctctacaaacaacactctttatatgtccatgcatgggacctttgaactgattaagttgattcaatggattatattgactagtttgactgatttgactacattttattactcttgactgtttttagaatgtggtacttttgtgttttttccacattgggccgagatattatcatagagcatgatctcgtcctgagctcgtgaagtctaacattggtgagacagtccctcctcgcccgatcatccggggtgagtactctatgtaagctgtgagagatagactgaaggaccctaaatcctatcccaagatgtctcttgactatcaggtatcaggcatgtaggtcacgacaatccatgtgtatcaaagttcttcgatatgattcccaaacaggtattgctgcctatctaccatctctcccactggctccaacactgctccacgtcgacatgataaagattgaatggatcgagggcctttcagtgctaacaacgcaaaatgtcccccaacagtcggacgggccctacacaaaataggaactcctggctcatttccgtgcgcagaggttgcaacataccgatcagagaaaggccaattgtgttttccattggtcatgaacgaccataagtcatcgacgaactcgtccctggtgctcgtttcaaaggtaccagccagccacatattccaatccgatttggcccagtcttggcgattatcgagaggaacaccatattcaccgcgaacagatgtgaaaaagttacttcccatttgataggcagagtcgggaaatgtattcaagcccagcaatacatcagggaagagattatatggggtcttccaagtacctggccagtcaggatattccaaaacaaaatgtgtctggtctttgtctgttcctaagccttgctggaagaagatatttgcatgctggtcaccagcgcgggagtaaaccccatctccactcatctccccaaacgccttgaggccaactgcggccttgattgccagatttgtctcgttcgcgagaggtccagctgcatcatttgacgacagctgattggcaatattgacactattttccagcaagtaatttgcatacttctggaaaacctccatgtaatgcgcagaccagtcggtatcgccagtggctcgaacatacgcagcagctaaaataagcagatttccgcattcctcgattggcatcggctctgctttctggtcatcgtgcccaatagcatggggataatgagtgccaaggtcatgaatcgtgtatggcaaatgccagcgaccagcagcaaggtacttcataatgggctccagcaatagtcggatgtagtccggatccatgacgtagtaaatcgggaaggcgggcatgataacgtcgattgtgttggtatttccattgctagaaagctccttgatgaaagccaacacctcaccggtgtcgagagagtcattgggaattaccaagtcgatgcctccgtatgcttgccgggtcgaaagagctaggatatctgcatacttgggacccgcagcggcagaagataaggcgaccagctcccgatccagtttcaatgactctagcaatgcgttgctatagtcatccaagaagaatgagagggcgctcgatgtggtggggtactctgcacgatagaaaccagtgtatgcttctccaagatagttgatggcggcttctctttcgtacccgaccacgaagttcacagaatgcccaccagtgacgttaccaagattgtgagccagtgcgacaacacttccctcagcccaggtatcgtcctcaccagatagtttaccatcctcaccaaatagccttcgtacatcctcgggacttcccgagagagcggttaactgactcaagctagatgatcgagaggcgagaattgctgagccccaaagagccatgtcgtctgcctcggcatacagcggtgcgtcttcgaccgtgagcgagtaaatggctaggccgtcttgctcttcgaagtcgcgctgtgagtggctttttccgccagtccacctggcatcgatatctgaatagatctggatctcatggccgcgcgtttcagctacctgtactgttaaataacctattctcccagtcagttgaggatatccacaatctaccatattgcacatcacccactaaaaggaagagactgccgaacatagtttgacggtgacacaggcgacaagaaatccagcttaaatgccacgggtccagccgtaagatcaaatatcgaatgcgtagcggtaaattcagcgcgacgcaccgtcgcagggcggatattgcttacgcccatgtctggaacgcccatcagactatatgcctggccattcacacggacaatcacagaccagccgaactcttggccagcccagaactgaggttcagcatagggcaactgctgtactcggtcgctgggcatccatgccgatagatacgggttgcggactgctagcgggtaggacggtgggaggacagggtgatgcgttacggaactcgattcctggcccgagtagagggagagcatcgatgcatagagggggcctaagcccagtgagcttagactaaatcgcatgttgaaattggtgcatgtgttggaggttgaagagtgtgaccaaacgagccgggcgcatatattatgaatggcaatatccacggcctagatggaagtatattgaagtcagaaactgaactaaagaattccttgtcgatcttcctgcgtcatattggagggggcccccacagtacttacgcgttcgcaactatctacaacttcccaattcgccgcccactttcatcgaaatgaatatgctttccagacacgagcgcatcctagaggtaatgatcaatcccaacggtcttcacaatattggttaacttcataaaaaccggcgtgttccctaagcaatatcttcctcgaaggtagggctggaccgacctatgaggaactcatcaagtaatgccaccgttgtggtattagctggtaaagtttcgccgagggttgtcatccactgtcaacttgccctgagtgcctatttcaccggtatcctccccagcaaccatcatgcgctagtaatactaggcaatcatgccattccggaacatgccaacaaacacaccgttgcaccaggctgtagactcgtcgtaggagccggcgggatcgaacttgccacaacgctagccgtggataacggcaggtcgtccgatgagatatcgctcatcttggccggtacgaatcggcaacgtctagacaagtcgtacaccaccttcagatagggcttcttcttagcagcctagaccactgctttgcactttaaaagatattcatcaacatttgtcgtaacttcaaacaagaagaaaatacaccactttgatgtcgctggacagcggcttctcccggagaacgtgcaagtcttgctcgagcttgattgtcccctccgcgtgcacgtagccgtcgcaatcaacagcctgtagatcgggatgcttgggcatcttattgtggatgatgtactgggtcatactgtagggcgccaagttcagtccaacaccaaggctgagaacacggtattgaccgcacaccatagtctagtggcttgtgaattgagtttgcttttcgcgaagtattgcaccgacttggcagggggtatcattcagcatcccctcgaccaaagggctgcggaatcaccattgcaatccatgcatgcaaggaccagttggaatatgaacgcggtcagctaaagattgcacagtggcaagaggttgacgagagtatagatcaggagtgaaaaacaaaagagtaattcaggtcgataaagaccgatgactcagtaaaacgacccgaacatgaaggtgtcatggaaagtccatggaaaattcttccaagtctcccaaacaggtatgccaaaggggtctggtcaaggggaagatctcaatctcagggggagcatcgtacgtagtcacaccccacccctttctccattttacattatttaagtcaccgttgcgcttcgttttctttgattaattccacatatactacaacgtgcagaacaagaagtacttgatatcctctgtgatatcctctgcaagaccccggcgtcccctacgtcccgcccccgcaaaaacaacctcgcgctagcggaagatcagcattgtctcggagaaattgcaagcgacgcgcgtgacaggccatttgtttcgcctccggtctcaccttcaaacatgaacacaatcctcgcgttcttccacgggctagtcccaagatgtttacggaaatccgatgtcacaaattccgacgtctcgaggaatcactactatatacccgtcatgcaaagctcaaagtcccccatgagcgcaaccaaagagcataagatcatatcaattccgatttcatgcgcatccccgccttcttacaacgatgtaagcggcgccgttatcataaaccaggatggcaaacctcacttcctatcaccagaggaagaggtagagcgacgacaccgactgcagcaagcagtgcgcgagaaaatgttagggctaccacgaatgaccaagtttgaatggtatcacagaacatcgggaactacaggccctgtgagcgaggaactaccaccaccgctgtataccccccgagaagatgagaagaaatgacgtcataccaagtgctggatatgcagagtattgacagagcgttggattccctactcgtgagcaggatacagcccgcagtacactttatatagactgcaggggtctttgtatgataatgcaccgagggttcacctttgaatttcatggccttggctattatttatacaagaattgcattcgtagatgtatgcgaggctagttccggaacagtctcaagccaccttcctcccgatcaacatcatcctcttcatcgctgatatcttcatcaccttcaccgagcaagccgctggccgttttgccgagcagagaagcaaagaactcatctcgtgcgcgggtagaccaggaaccacggtcatcgggggccatgaagttttggagcttttcatgcacagtgtacttcattttgcggcccttggaagcacgggtatcaatatctcgcttcaccttatcgttgcgcatcccagtaatggggtgaataggcaggcgcgagggcaactggtgcaggttgtcaaagccactggtcatagaatcggctgaggacatgcgctgttcaacaagatcgcgcaaaagggactggtagaaagccccatcatcgtagagaggttcttgttgatcagatgtgcgcgaacgcttcgaggatcgttctccaatctctgtggcaacttgagcatcgagtacggctgtgatggtctgttgacgaccggaggtagaaccgagcagtttgcctctagcattaggaagagatgcagaagtgccacgaactttcgaggaccacttgtcgagaatggaacgacggtgcgaaatggactgagactccaattcagccatacgttcccatagcgaggtagagctggtggtaggcgaagcgggggagggtcgcttgcgctttttgctgccttctttggcggtggcatcggccagggcagtacgtaaaccttcgagggtcgaccataacgccagagccgctgactctgccgacttgattgcttcctcatcaacaacttcttcttcttgattcatctcgttctctccatctgcttcgttctttgaacccaacacagcagcaataccgttaatagaggtcaatccactctgaagcttcatccgcgcgttaaggagcgcatcaaaagtggtacgttgttgcttgacagcctttccctttgtagcatcggccttggctgccgaggagatcgtggcagcgatagttttctgatccgttgccattagtttccgaatctcgtcgcggtcaacagacggtccgcttgtgtcgccatgtcggacatcttggagcgttttcttggagtgcttgtcgactacctcgtcggcatcctcatcatcctcatcatcctcttcgctctcttcgtcatcgtcatcctcgcctccctctgtgtcctcatcggaactctcctgggccagggcatcgtcgccactggcagattcttcggagccagacgagacatctgtgttctcgtcgccttcatcactttcggcgcctagtgccgcccggctgactcgggcaccatcatattgcttccccagtgggagggggtcatctttgcggagctttgctttcctgtttgattattagcgcgttgttgataccaaatacacatatctttacacacccaacagtttcataatgctctctgcctgccgtcacttcttctttatcttcaccttcctcgtcacttgattgctgaccattatcgatatcctcgggatcaaaatctaagggcgaagttagcattgaatgtccagtactcaagaggatctgttatgcatcattcaggcatacctttaggagttggatcttcaaaatcagcaagctgatcagccagggaacgacctgcgcgtggtttacccatggtgtttggtatgaggagagaatgagagattgccgagcaacttttttactggtttttccggataacggattattattcctatctaggtttagcgcccgtaggcagtagaggttcatgtgggcggtgtacagcgtaagagcttcgactaaaggcggtcggcccttttcttggcagtatcgcagtggatatcttgcactacatattctagaactacttctgttgctcacagattattaggtcctgcatttttttcttctcatctgcctcatttggcctgtgagtatgttggttctgccgtctagctccatcactaggggtgcgaggcttttttctacatatcttgctcttcagcatgagaatcctttggttagttgttaatctacatttcagagctccggtggttgcctctcggctcactaattgactctaagaaccattctcatttgttacaagagctatttcaatttgcattgactgactatgaacagggacttccacgctctggtaccccgccaacttttcgttcgcgccgagggctgcctgagaagcgcaagattcgagatgttaacaaaattgttgcagtctcttcagcaaagggaggagttggaaagtctacaatagcgggtacgtagatattatcctcctatctaggcgcaagtgtgagcccaaatggaacaaacagtcgctaaagagatcttatcagtcaatctcgcactatcatttgcacgccgtggtatcaggactggaattcttgacaccgatatattcggtccttctatccccaccctccttaatctctccggcgaacctcgcctcgacgaaagtgagactccctttctaagcttaccaccatttcagccataatcaacatgcttatgaatattgccagacaactgcctcgttcctctaacgaactatggccttaaatcaatgtcaatgggctatctcctcccccaaacacaagccgacagcacaagtggcgagctacctatggacacaacaccaatctcatggcgcgggctaatggtaaccaaagccatgcaacaactccttcactcagtgtcgtggggaccactggacgttctaatcctcgacttaccgcccggaaccggcgacgtgcagctcacaatcaaccaagaaatcatcatcgatggggcagtgatcgtatccacgccgcaagatatcgcactccgcgacgcagtgcgcggcatcgggatgttccagcgaatggaagtgcccgtgctcggaatggtacgcaatatggcatatttcgcgtgtccacagtgcgggactcagacccgtatattttcgcatggtgatagccaccaccacgcgcacggtgagaaccacggcgtcgtggctgagtgcaagcggctcggagtggactttctcggtgacatccctctggatgctcgggtgtgcgaggatgctgatcgtggaatgccgactattgttgctgaggagaatgttgagcgcagtgcgaggcgggaggctttccttggtgttgctgagcaggtagctcggaagattggtcttgattggcactgaagggtcgactcatcttgcccagacgtagagttatgaacattgtgtattattatatcagactcccatatccggtggctggctactggctatttatctcggcattccgtttatctgggtatagactgtatttattctcagaactatgtacttccatctacaaatgatggtcgactgctagaggcctagtaattgactgcaaaaagggtatatccaacacaaggaaaataacaaaaggaaatgccaagtcgctgcacatagtttcaacaaaagagccagcaatcgaaggaaacttggacatatttaaaacgactgttcaagaggatacggatatgtccgtaaagcaattctacaaagcttactcggcggttttgaaaacctccctgtccggtatttcaggacggtgggatgtggagtctcgaccagccgcggagaaaacagatagagtatctgtggaaggacggccattctcgctaaccaagggggcaataataccccgcgcgccagtcacagcttgggtgctagcagtatcggatgccatgtttgtataggcgacggagtccttgtcgccgccaacggtactggtagtctccgacaacatttcgcttcggtcagcggctgatcctgcagcggatgatgaccggtacctgctgtgagctaaggaaagatcggatttcatcgggagagagcctgttgcgtgaaagagagccctcgtgctggcgttctcatccgtgaatttgtgattgttcaccccgggcaagataaggatcggagcagcacttttctgtgagacgggtcgagatgcagcctcggaatctgtagacatgcgtccaatagaagaatcgccgttactgaggcattccgttttatcctggttggctgccgtcggctgcgatttgttgtcggtgaggtctttatctgttctgctttggggattcgtcgctggagtgctagaccatgttccggcctgcccattatcagtgctgacacgggtggcacgtctgcccgattgctcgatccgattctccatttccattctgcgctcgtcatgtttgcttccccagccgctccacatcatcatgccgtagttcttcttggcatgtcgttttggtaggacgccaggagcagctcgccgggcggccaaagagctcgggggaggacattcgccatcaaagtcttggaagccatgcgccagctctatcaggcgtcgcctctgaacccgaagtttttccttcgaaaatctgatatcccattccttctttgcatccagccacattcgaatgagcacggggttgattgccccgatttgggcagggggaatttgtaacgatgggtaggaagagggagtgtctagcgggaagacatgtcctcgtttatcaattcgttggcgtatcatgtattgatggaacgctggaagaggatctccggccttaccgacagaggaaggcccacgtgcgttaggcagattggtcaatgcaggttgaggccccggcatatcttcatcttctgagctgtttgacgaaacgggcgaaagagcactatcatccataatatcgacctcgccgtgctgtgcacgcgccaaggcccaagagccgaactgggaaatggaacggaacatgtacttggctggtcgcgtaaagctcagagtgggagcgacatgacataggtcgtcccagacctgaagttgtacataagtcggttcgtacttgttcaaaatctcccgggtgggatcattctcatcgagatatacgtcgctcggtgggtatgccgatggattggccgctttgtgggcgatgtagaattgctcgtcacgaagcgtttcgccgccgccgctcaatatttgtagaggaggcaggccacccagagagggttgtaggactggcgaaacaagagggtgggacatgagctggttcgtcgtgtaaaactggatttggtccttgagttcgactgttttcccgcccaaggcaacatgaatattatcgggttcggcatccaaactagcaggatccggggcttgctgctcgccagggtaggaatattcggctgcagggttctcatggatagtataaccgcggatagcagtctcttcagcactgctgcgcggttggggaatagccttattgagatcctcggaagtcactattggttggcgcgacagtcttttcatttccaggatatcatcagcattaggaggaggccaagcggacgagggtttatggcggaagccataggcaggaatataatcacctgggttgtcctgaacaatactcgggaaagagtgtgttaaatcaacccagggtgagatcaagatggcgcccgcgggtaagggaataccctggtctctcataacgaccagcatcgatagagccaagcctccgcccgcagagtcaccggcaagaatgatttcctttggttcataggacttgagcagccagagataagccgccatacagtcatgcaaaccacatgggaaaggaaactgcggcgccagtcgatactccggtgcaaatacacgtcccttcagtttacgcgcatggcgctgcatcatgtaccgatgcgtgtcgacacttccgaagaaataggccccaccatggacatacagcatcacacggttacaatgcccaccggccccctccgtttgagcgtagtggctccgcatctcaatccactcccccttcatctcttcggatggcccgcgccattgccaccatttctctcctcccacccgtacgatacctttggggcccagctgctttttgacagcgtccgcagcagagcgcaagaactcgtccgggattgtgacggtctcggttctcacccaatgtggacttgggacccattggcgagtgaacgcctggaagtcttcgacggggtgtttggatgcataaaataggaattggcgaatgatatggataccttcatcgtaggtaatgtgaacggtgggtttgtcccgtaacgatttacgatgcaggtactatggatcatgcgctatcagcaagacaatccttaccctatcagggtattccacaacttacgtgactgatgagagtatgaaggacagtgggagtcaatgccacacctagtgcgactgtatgtaatggcataattgttctgttcggtggaaagagagtagcaggattctaactgtcgcaaaatccaaggaaaccaaaactaggaatcagacttaaatgaaagacaaaagcgaagatcggtcgcaaaatgggccgacgtcatttaaagagtgcaaggggattggaagaagaaaagaagaacatccaaacccaaacgagaggcgatgatgtcaccgggcctcggggaaaccgatctgcacctgacctccgatcacttaccccatacctccagcctttacaaattaggtctcctcggtcttccaatccaactgacattcacaatataaaccatggcgatgacaccagcaacaatactagttgcaatgaccgcccgacgcggtgctttcgcaagcttgaatccaagcccaacattgatgatacccagaatcatcatcaaccgtccaaaccagcgatgcgtataggcaaaaggtccttttctacctgtcttccggaagaatcgatgctgcaatacacccatagcaggctggaaaagaataaggcttggtacgatgatcatccctaggatggtatggtaagagttgaccaaatcaatctgtcgtgcgagggaaacaccaactccaaagcccgcgattaccacggtcagagtgaggagttggaacgttccgtgaatgtccactgtccatttcgatgggaagagatgaagtccgagcgcgaagaaagggaacatgaccacaaaagccagaaccatgagcacagcatgggctgtctttttcctcttgactgttcgttgcaaggctgcaaatgccggatcttcactgggagagatgggcactcgggctatttgggcgaagggattcactgaactgccgcccgtcgcttgtttcaggtcgacattcatgacaccgtaatcatcatgttgggtgataccctcagataaactgaccgaattcaggggctctccatatttaacggaccaaatccacggacttgaggggctgttcacgttttctgttcccccattccattttaggcaggtatcgcatcgaacattggcagtgataactccgtcgtgtacaccactaccattcagaatggtgatctgggcgtccttgttatacaacggttcaatttccccaacaccagaccgcggagaaacggtgaccttgttgccagacgtgtacacgacaaacatattggcgcctgccatttgcattccttggcccaaggcaaaccactgcacttggcgagtagaattcatttgaaagtatatggggcccgagcctgactcagcagtattgtcggggacattgaagctataggtgatctcactgtggccttgcggatgaatgctatgaacttgggccagggcaggaatggcccagagccaagcgaaaatatgccgaaccattgaaaaaaattgagattgacttatgatctaacaagggggtcatcccaataaataccctcagctctttgttgcacggttgacacaccaattgggctgcgtcaggccaagtctttgtggctgtgacttatgaatttcttacagacatttggaatacctgtcaattggttgaaatattatcttacacgatgtcgtcgttttgtgtctgagctacctaaagtcaaaggtaagacgactttgctgcgcctccccatgtcaaacatgatcagtgtcgggtcagccgcatcaattatcaaggctacggcaattctcagtgaggtcttattattggggacatatgagtggtcaaccgacattgatggctagagaaatgtccataaaattccggtgtgcctatgcttttggagtattcaaccgatgcagtaatggggaaataaagttaggcatagcttcaagcttatatctgtgtttatacgaggtcaagggtgtcatacgaggggaaaagaagacagttagttatacagcatctcatttactgtcaaactatctgtcaaactatctgtcgggataaggacgtcctctattgcaatgcataatgacgtcctctttgctcttgaattttccttctcgaacgcctagcaacgctacaattaaacctaccgatgaatacggcttcacccttgtctctcccaagaaaaggtcgaggttcatttcgacctgcagagtcattcagtgtccgaagcctttctttgtaacctctgctatcctatcgtagaaaagtgggttcgtcccaaccctgtctctactacatacttcttagactgataaccttacataatattgagacaatgcaggaagccccaaggtccctttccacgcggtacataacggcactctccacggagaatattcccacttttttaggaagatagacaaaatgagctcaaatgattgcagaggatattgtcgatcgcattctcgtccctttcttggcaacgcagaaggtccccaggaacgaagtgtgggatgcactaacaagttgaacataaaaactacaatccatttcagatgctgatgctgagctcaatcacagacaccatgcttggcaaatcatatttcgcagtggttatgatggccgctcaggctttgcctgtattcggagcgacgagggaacgagaaatggtcaaagtgacagtctccgagacggttcgaggtggtgaactagctaacattcacctcgactggcttggccaaccgccaactttgatcaaatctgtctatgcgccctgtgacaatgaacattcgttggcaaaagagcaaattatcggacagttttcatttcatggtcgccctccacagcgactggtttgggtggttccagatgaggctccgacgcaccattgtgtttacatatatgggtctggcggcccaaatatgacgcaaagggtcttaggcaaaagcagtcctgtctccttgcagaagaagcctaggaaacgatccacggcagacaccatcccattgctgaaggactttgatgcgcagggagcatggttcgacggagtggccaaaatcaaagacaaagtggaaagcagcggaggcgttgcttcaaaaggttcaccaaagaatacctcaatcgcaattgttggaggcgggatctccggacttgcaacgggtttgatgctggacagcgtcggtatacataactgggagatcatcgaagccagcgaccgcgttgggggcagattccggacgaaatatgtcgcggacactcaagagtgggctgagatgggaccgatgagacttccgtactctgtcacttacagagatgacaatgagaccctcctgtattctgatcatcagttgactttccaaatggccaacatcttgaacaacatgaacaagaatgactcgcagtggaggattgatttcatcccctggatccaacacagtcccaatgagttatatgctcaaggaactcgccgtcatcccgatggaagaatcccaactcgcgctgagatcgaggaggatccaagcctgaaggacgcctcagaaatgacgagcgccgaatacagcaagaccgaggatcagatgaacaaaattctaaaagatgaaaagactctcaaatctcttcagaaggatgtctggagagcccacaagaccgccatggaccagggtctcgatgactggagcgaacaggcaatgatgcgacatgtcttcaaagccagtcagaacatcaccgacgagatctggacctcctccgactacgatgtattctgggacgagctgcatcataactccaatctcggcctagatggaagcaaggacagtctgggcgaaacaaaatggctctgcatcgatagaggattcaaccgcctgtccgaagcttttcttcctcacgtccgcgacaggcttactctcaatcgaaaagttcggaaactcgaatcagtcaagggcagtgatagtcacacccgcactcgactgtcatggtaccccaatgtctcgaatcgcacctttgagtccaaagagtacgactacacaatcatggcagcgccatttaccatgacccgcttcatggatctacccaaattctcctcggtcttagaccgcgcgatcagcgaagcaggtctacgcttcaagtccgcctgcaaagtagccctgttattctccgagcgattctgggaaaagggcgaccgaccgattttcggcggctactccaagccattaagtgactcagtcggtgcactctactaccccgtctacggactcaacgagtcccgcccgggtctgatcatgcactatcgaggcggcgattggagcgaccggtttgtgagtttctccgacgaagaacacgtccagacagtgctggattcgattgtcagcctgcacggtgaacaagcacgcgacctttacacgggtgattatgagcgcctctgctggcttcaggatgaatatactgcgacttcttggtgtcggccggatgttgcacaacatcaactatacattccggcttatcatcagacggagcataacaccattttcattggagagcacactgcgccaacgcaggcttgggttagttcttcgctgcattcttccgttcgtgggtcggttcagctgctgctggagttgggtttggtggatgaggcgaaagaacttaaccagcggtggatggggagatggatcaagctatgatgtttctgtcaagctccttggtttggagtatatcgtagcttactctaattaaaccattttcggtattttttaaaaagatttatgatagtatagtattaaaaccattatcgatgggggacagtgccggtaaaagctacgaatttactgaatacactcatagttggaagcgcttgaaaattaaattgcttagaaaacactagtacatgacgggcataagagggttgcaatgtaaagacagtcgaatagacattcgtggctccttgttgcgtattgagacgtgggcaccttttgtgcgggatgtgtgagcaatgaacaatcactcaatggtaatcttcttggtggtcgaggtagtggccttgggcacaataatagacagaatgccattggtgaggctggccttgaccttgtcctgatcgacactaacggggaaggagaaggtacgttggaattctccaaccgatcgctcgctggcccagtagcggtaagtgggctcagacttttgctcagacttttgttcagacttctgctcaacctcatcgccctgcgcttcagtctcgggcacagaggtgtggtactcgcgttccgcgcgacccttcacattcagggtctgggggtcggagaactcgatgtcgatatccttttgagagagaccaggtagctcgccgtcgaggtggtaagagtcatcgctttcgcggacgtcaaagcgaggggagaacgagcgagctgcaggctggctacgaccggagcggtggacatcatagtcgtcaaggagacgaaagaggggagcgaagtcactggaaccaggaaggctggcacgcaagagagacattttgttgaatagatcagatatgcttggagagcaggaagtagtgataacttggcttgtgaggatgtgttgatgatgaggaaaacggtgggtagttggggggcattatatagccagaggacctctcttctcgaaactaccctccatatttcaggcaatttctggaatataccacaattgcatcatgagataaactgcccggcttgttgtttccagctgtcagtttgttacttctccaagatactagatgcttctccacatttccaccacgtgacacgaaaccatagggctatttttggttcaagaagcaagaacggaaacaaataaaagaagaatataaacttagggcttatgtgaaggccaatcagaacagttgtcaaacaagtataatgctgcttatatccgacgccctatgtctatatacagttaaggcattaaaacattcaaatgccagagatccattgccaagaggggttggagaacaagtcttataaagagacccgaataatagaataatagaataatagtaaaataaaaaaaaagaagagggatgtagaatcttaatgcacagaaagggtcatcggcgcggtacaatcaggctatagaggcttagaatgacgggctagggctacttaactttgctggagtatgcggagcaactcgaacgtgcgttcgtacaacagcagtgttggacattaaagacggacgaaatagtcgggatgtctgttgctttccaacttacttcaattttcaacatagtttgttaggattgctagcattttggagaaactcctctcttgcgctgtgattggtgacttcccaatatttctaggcgcctaatatttcaggctccattctaacccggtcaagtctggcagaatctcggcttggccaatttcgtccctcttaagatcaattatcagttcactctgcacttttgtctgactggctcggattgaatgagataaatctgacactaaaagactgtctcgtcgactttaaatcatcggtccattggctcatagactccctcggcggtgaacgccgaagtgcagtgcctaccaatccctgccgtccacgtttgggctcgattaggcaagaaatacacatattgctccttccataactctccgtacacccgagtcaccacaaatttggtaaacaacacgtcaatccctctcttatctatcatggcttcacccacagcagccgttgacaagttatttgtctgtcctggatgtcagagaggtggcttcaaaagcatgggtgctgtcaaggctcattttgagtctaagggccacaaactcgcttgcagtccatgcgacaaatcttttgggaatgtaacggcgttgctcaagcactcccagaagcatgaaaagcccctagatggttccgatctcaagtcggtcaagtcggccaaaccagcaccaaagagcacgaagcaacagaggttcccggatctgtctgagtcttttgttaaagctgcaaacccaccgcccaagatcacgaagcctaaaaggtcacaggatccttctgagcccttgtctgtcaaccctgcaaaatccattgcaaagaaaacaaagcctgagaagtcacaggaattgcttgcgtctttggctgccaaacctgcgaaacccattcccaaaaaaattaagtttgagaagtccctagatcggtctgaaataatgcccgccaagtctgcgaaaccagctcaaaagcacacatcaaaccaggcatcagtaggtgctccattaaggacagacgattttgaagacctatggaccaagacttctgaacccctgaacatctcatcgcctgccatccaaaatgccaattaccatgttttgctcgagccgctcgagcaaaatttgatctttcgctacttgtcggctcgatgtcactcggacacccgtctggtcacacgaggctttacctttcgggatagcttggcagatgtcagcaggcgcccgtcgaagaagccctctccaaagacaggacatttccgccaagttcctcgcccctccgacaacttgccgagaaggagagcaatcgttcttgactgtgagatggtgcaagtcgaagcagggcgtcgggagcttgcttttttaagcgcgattgactttttgactggcgaggttctcatcgacaactatgtacagccgaaatcgagagtggtgaattgggattctcggttcagtggggtgactcctagtgccatgaacaaagctgtcaggaaagggacagcgttgtttggctgggaagaagcgcgctcgaaattatgggagttcatggacagcgagactatcctcattggtcattctctcaacaatgatcttgacgtcttgggtatcattcactggaacattgtcgactcctctatcattaccagcgaagcggtgttttacactgtacacgccggtgaaccactcaaccgcacatggagtctgaagactctgaccaatgaattggtcaattatgatatccaagtcgggaaacagggccacagtgcgctagaggatgcacatgcaacacgggatattgtgatctggtgtctgagatacccagagcacctgaaggtatgggcggacaatgcccgggatcaagaggagcagcgcatgtacgagagggaattgaagaggacgaccgaggagcaggtcagggagcaaagaagacaacatgatatggagataaagatgcaactgttatctcaaggcgttggtggtttgggtcttcatggcattggcctctctgatgatgatgccaatgaccctgattcttctttcgtcgaccgtgatggtgacgttgaatacgaatcggtaactattgaagcggctgctgtttcattcttctgatactaccatgtctataagtatctgttaattatgatgttatatgataattcaattacaagtattcagccgtgcaatcattgcgctaatcgcccttgctctccttctcttataatattcgacaagggatatgccttcgcgatgcaaaattacaggagcgaatcctatccacaagtcgatgccactcaaattcaaaaggccatggcctcaaccaaccgcaacctcacagcctggatgcactgttatacacagtgacctctgcagtcatcgacaccgttcgtgtctccccagcaatactaagagaggtctgccatatgatcgagtgactcaacctggtattgaaagtgacaaaactaggctggatgctagccacaagactgagacgcttcccatcactcatcagaccatcgtgtccaagaacaagccgaagtaccctcccaatatcaacgggagtatcattcggcccagcaaaagttacaataggatccttgagctgctcaaacgctttctccagccccaaatgctgaacaaagacatgttcatcattaggaatggtataaaggctctcctcgctcggtttgagaacaatctccactttcgaaagaatactcatcttaaccgccgtaacctcgacccgttgcacaacatcccaaatcgcactactactcccgtcccgccgcggaataaccctgataagaagcggaatcggcgacgagttatcgagttgaatcgcaaccggcacacccatcacaacctcaaagctgaatccaggaacggaagacaacccaagaatcttctgcgtcttctgcgtcaaggataaccccacatcccgcatcgacggcagcagtcgctggctgcgcacccggctcacgatactgcaccgctgcagcgcaaaccggatcccgcccgcgtcgacgttcggatgggccagcgtgacgggcgctgtcgcgcgctgcacccgccacgacccattgcgcatataccgcagctgcgcctggagatagtactcgatgcagaccttcgccccgctccattcggtgtaaaacgttccgggtaacgggtgttgcgtgatgcagcttgcttctagggggacgaagctctcttcttgtgagtggtcgcgcactgctgagagcgaagctgcttcggggatattaattgagaaggggatgttgatccagtcggttggggtgctgggggagggtatgtggataggtccacgtaacagggtctgtgggggcaagtggaaaagcttccagttgccgtggcttgtggtttttgttgggtagccttctgttattaagcgggcttttgtacgcccgatcaatgtaagtgcgatcttggcgtctggggccacgaggtgcgagtggcggttcacgctgccgattattgtatcccctgcggcgtatgtccatattggaggcgccgcgatggatatattgaggttaggacctccggttgcctgggtgggatgcatggcttcatggtggagggggaaattctttgaaaggaatttcggtcaagccactagtttcttacataactcaggcagggggctaggctattagccaaaataaggccgttagctgtcacaaatatggaattgcgaattgtggagatgagctctgcaaggatagtatggggtagacgggtcaggcaaaggcaagcggggatgtcgagggaaactcccatagctcacattccgatacagtggctgtagggaaagaaataaaccctatgagttgaatcatatctctcttgctacatggtttttgcctgttaacctcgacctcgacctcgactttgtttgtgcacttccaaggttgccagccaggcccacttttagtcgtaactccagatgaactaaccaggtagttaacaactattaactaactaggtcagattaatgaactacatggacagaggcataagtcgagttttcttgtaacacctacatatgttgggaggcagacataatcgttcgaagcgatgcaccaattctccatcaactacacatacctctgaccatctatactacctacaacgattaagacaaaatactacaacatacggtgtacccaagcaaataccagaatcaaaatcaataaatccgggtatcaaattcgcactcgaaagtgcatacatacaacctcctctcgcagacaaagttcatacatacaagtacagttccaaggcaggtcgagaatcccaccagctcactataaagtagacaagacaagtcgaaagtctcgagtcgagcaggggggatcctcaatcagaccccgataacctacaagacacaataacaaaaaggatgcacgtcgaaataatttcgaggtcactgtgcgcccgctcagacgccgtgtaaaaataaaagccaaccaagacgccgcgtgcatcaacgatgcggaatgtgtatagtcgtagccaccagtgacggagataatatcagcatgtgaaggggtaaaagtaaagtaaaggtgcggtcgttccacgtattcccggtgtacacccatgtaccgagagtggagggtatcatgtagcgtgggataatatttcaaggtagggaggtgatgcagctttcgtgaagctgacaatgagatgtatcactcattggcctgctcgattctggcaggctgttgggagtcattatgacttccgggctctgcagagccatgaccgccaccatttgcaaactccgagaacggcggtgcggccgtcgtcctttcgctcggtgccgtccgggttacctaggaccatggagaagacccagaaaaatgcggctgtccatgcgaagaggaggatcacaatgctgagtaacggggataggagcagtacgaagattgaactagtcacggcatagacctcgctcggctcggatagcactgacggctggtctgaatctggctctgagcggatccattgggtcgattgggtcgatgacgatcggtcttccactgatggtggctgcaagcaaacgagccgttcgtggatgtggaggataggagaaaggagatcgcaaagttgtgatgcgaacgtcgttgcgcagaggtatggagaaaatgagcagaggcggaaaggtgaaacaaagagtgcgaagaggagggcgaatatagtgtatagagtagcgccgagtgagtagaatgggatgatagtgagacggaactgccaatttgtattagcatagaagtattagaccgctatattgcgcacgtaccagcattagaagagcatcctggccctcattggtgattatctcaacattcgaaatgggtcgttttcggacacgggttatgctcgggttggaaagttcccccgacattactgacggctggtctgcccagctgcttgtcgcccgctcttctttgtgtgcaccacttaatgtcgagccgccatcccgagcatctgagccgggccaggcagttcctcccagtgtctgagtatggtacacacggtgttgccgtgatccggaggtgcggggactggcatcgcggcttggtataggagaggaggttcgagattcgcctacagggtgacccaatacggaggactgttcttgggaatgacgggtagccggaggtggggtaacgatcgagctgcgagggtttggtccttgatcgtgatagtaggcgggactatatgacatctccggggaccgcatggcgggcgaggatataaaaggcaagaggtgaagacggagcaagagtcgtacaaggtagacgcacagagggcgactattgcatgtagaattcaccgcatggtttccgtaatcgtgatctttctggcataaggggctctcagtggacaagttggagggtgaagggggtgggcagagagggcggaagagagacttataagagagcacggagagccgcagcttgaaagagcggaaaagccaggaaaggccaggaaaggccgtgtcaggcagcggaagagcatttcctgctgtttgcaatccctctcgccaagacgcccagatgccgagcccttggcattgagttgagcacaataatcatttgtgggtatgctgctgatccttttatctcagatcccgatcatggctatattcggcctgttcgataacagggtagggttgtgttggacaagatgtgcagctgtcctaccatgagaccaaagatgctgagcggcctaggggtcaaaggatgaattacgacattttaccacctgccaagacgccaagccgccatcggggttgataagtcgactattcccggcctctgattggtcaaccgtggcgagatgatccgcgctgagacgagggctggagtcttggcggtaacagccgtacgcacgtgatgacatgtattgctcctattgcccaatgtatataatcctggcatcttccaatgtgacggagagatgttcacgttgtatgatatgtgatctactactcagagaagtgagctgagcagaacctcacagggctactatatacacgggtgcgtaccgccaaatcagggggtcaacacggtactccccaaagaggagacgcccagaggtcggcgggtgttggcattcgatttcggagaaatattctcagattcctcagtatctcttacctaactttccccaatgattgtcctgggtttgccaagggatagtattggccaatatagatactccgtacgggatacctatctgatatccttgccagacaggaagagtcttggaagtcttggctttctgaccctttcattccgctgctccgtcgagatgaatccgattatctcagcgaatcaacacatccgacgtccgcctcagatccagaatttgctttcccctcgatgaatttcagctcttggcttgtagggtttttctgtctggatgtctgggcactgtatacaaaaccgtattctctgcttggctgccccggtgagcggtcaagagtgactcattgcgcgttctgtgctcggcaaccctctgtcgagactgttggtttccctttatttacggctgcacgctgtccaaactcccttggctgtcagtctttaccaagaatcatgcgcctttcctcaaactcagcccatgagcaaccacacatctgccatcagccaagcacgcaaaggcatggcataacaatgacaggtggcgagtgcagatctatcatatccccgaaatccgggcgctgttctaaaccacctaacatgaggggtcgtggcctgctcgtgcgctggccatggatcaccgtcaaaaatgatcgactcttccatatctctcaaatctcacagatatccggtcgaccgatttttctatcattggtcgcatattccgctggaaaagacaggtaagatgttatatatgaagacactttcccccctcaacccctcgcagagctgagatcgttatctccaagcaaatctcttctgagcagctctctcggctattcatccacgagtcaccacccacgccccacggcatatatacgttcagcttccttccagagctttcctcacccatatggttgttttgcactgatgtttccagcatattgtccatatcgcaagctcatcgaacccacgatgaatcttcgccggcactgtcgaatcgcataatcattcagaacgtgagattcaggagcttggaaacaaattaccgaagctgtcactaaaattccgaacggcatctcgctattcttcgccaattttagcattacttacaaaggatttgtgcatgcttatgcgctcgatccttaatcttcggttccttgtactggcttacaaatggctcttttctggacctgcccgtggttcctttactccgtactgaatttctgcatctcaaccaaactgacgaaccccgagttgataaagtatatcctacgtcatagactctccatcatggctaagacgcgttcttggtgtccacggggaccctttctttgtgtacgttgtatggatttcatactatttgttccaccttggtattatcttgaatatatcttcaaacactctgcaaatgaggtttcctactccagacatccaagctacaggtggtcacgtgctcatccattgggaaggttggcttttaaacagttgaaagaaatatgaatttaagtgctttttcttttattgctgagatgtgtagtcctcgatcggaatgttgtataatcgccgcacagagaagtgattcaaattccgaattgaggactcgaattcatagcgaatatataatgccgatctgaggtttcgaatgcaacaagcgatccccaaaaactcctaattcaaaattgaagtagtttatatgttcaatagtctatactctagtaaccccactcacaaaaaataatccaggttcccccattcgtggctgacgggggcttgcagccacaagtgatcaagatgtgatgcaaccagccgactcagcccgcatcaatcactgcttggtcttattggctcaacggtacctgaaaggacccgggccgcgttgagggcttgccttggggtaatgcaactatgagaccatagacccgatcctttaaacctaacatcaaatgataagcatcctcccaggtcatcatacacgactagacttatatccctcgggcctcatcgccaacacatagcaacacagacatgttacccaacagaaagtacctgacacaagaagtatctgtgccccacgtcctggaacgcatctgcatcgagcccggttggaaatggcgcactcttaggccaaccttggaatctccccacgatccctatcttatcactgatcggggagggtagaaaatggacgcatctgttctggcgttttggtctttgtcgaggtcatacaaatcgaacatctgtctctcccaactagaccggtcttcaatccctgcactctggactatcaggtcttggcaagacatgacttgaaactttatgttttatttttttggctttgagttgccttgcttttttaatttcctcatacgatgtgactggcgatgggcgtgtgatattcactgcgaggtagagtgtggtctaccgttgaccgtgcagatacgccacgcccgagaagaactcaatttgaggatacgtatacaacagtttgtatggatttgcttgacggcgctctttcactggtcaactcggaagcgccagtgatttctattcctgtccattctagccttgttccctggcccacacacccccctgcctcgattctaactctggaatcgtgtcgcacggtcatacccaccgcctcggagcatggcgtctgcgaaatcccgtcgcagggggcgttggttcttactatttatttacggtctcaggatagaagtcatgggggtctccacagtggacacagcgatgggaccgcgatgcagaggcatgcgcgcggctgatctgtctctggtcgggccattactgtgatcccggcggtgcttttgcttgcttttgacatgcttccgagatttgcatttacagtgaaggtgttttttgaagattatatattctgcactgatcaaccaaagctcggcgagaataccgaatccaagatggtagaggttgagacagggaatgaaagagaaagaaaaagaaaaagaaaatatcaattactgcaagtcacaggttttgactcggtcggcaagtcgaaataacaagctgcgtaaccccagagatctctaggaaccatatacaaaagatagttcaaccgaggctgttttctccgtctcacaacccccaacggcaaagacggcggctcggctagcaaaccctgatggaaatgaggcgtacccacgcacaagtggagtccatcattgggagaaaataaggtacacacgttcttcaagccacgtatgttggatacctacgtaggtaggtcttgcaaatgtactttagatgagacaatggtcagcatatcagtacaccgcaagggccgcgacaacagaattccacagcgtcgtcgcggttgtcatatccgggagtctcccgaggtccactggaaaatgtgtaatcaagatcggcgcatccacaggcatgcaccagccacaagcacagggccatttttcctgtggctgacgaaaatttaaaatgaaataagctgtggatacacgctaagccgcttaaagcgggtacaataatgacggaaggggcgaatatgcaagtcaaggtaccctgcatggggactccaaacaaacccatgggctttgaagggggtgcgacttggattgtatacaatatactccggagaaaaatgggaaaaaaaggagaggggacacagggtcactcgacagctgcaccctgcacagttccgggtttggtctgtctgtgctggtcttgcaggccattgacgtagacggagtacggagtacatccggaggaattagctctatattccatggctagatacggacagatcgcataaagtacgaagaccgggacaaagaaaatcaagtcactaagaatgatccccggaggtagtctccgttctcatttgacgggggattaagtacggacagtctaaagtgctgggcaaaagggggggggaacaaggatctgagaaagccaatgcggctgcacggccctgtgggctacatagcaccacggagcacagtcgcactaacgcaccttagaggcaaccacggggggagtccccactcggcgccttttgccgggggtttgtgtgtttgtgttttgagagagattgggcattatgaattcattaaaaggggagagactatgagttagagtacatttctatacttctagaaactgcccatagaataaataaccataactcttcttatatgcttaattctctcatgagatcatgggtgggttttgaccaagaaaggaaaaaagaaaaaaaagaaaaagccaaaaaaggagaaaagaaaattcaaaaaacccaaaacgggccagaaaataataaaaaagaaaaaaagaaaaccagcataaccgcctccagatctttctccacaacgctaagccgttcctgagtgtcagcttggcttatataatccgtcgtgacggtcggagctacccaaccactagcgtctcttggcgaatttcacctttcctgccagcccctcgactcttccctctctcttccccccttaggcattcggatcatcttcaatactgacttcccctttccccactgtatcgccttgtatcttcgcctctttcttcaatcctttatttttgctcgtctaccctcgcgcaccaagctcgacatagctgtgacctaacccgctgccccgagattgtgtcactgccatatcgcgccactcatatatcgtcgggacagcgccaaggtctagtcgattttggaaaactgccgccattcacggcttgatagtgtcgcgtgagggaccgtgacttctttcgcgacccgttgtttttttttttttaccttgttcctagtcgatcggaaattgcgcctccggattggcgtgcgatatcacacgagcacacttgatcggtgtctaatagtggtgtgaacttggattgcatcatcgtgtcgcaaacctaccccgagagttcggtcgcgacacggttcaactcaaaccatattcacgattctcgggaaccatgtctcatactcaaccatcgcccaccacgggcgtggctcctcaccatgccgcagcgcatctcgctcatgcgcaagcgcaggcgcaggccaatggtcatatgtccgcaattcccgtgcaaggtcaaaagggagtccctactctcaccaccgcgcaaaagatcgccacactcaatgaacaagtctggcttcaaataggtaaatattcccgatcctcataatttggcgaatcctgacagcctcgtttgtaggaagcttgaccgaattgatgggcgatctggagggtgcgatgaatgcctacgagcaggctctgcgtcacaaccagtggtctatctcagcgatgaatgccatttcatgcattctccggacaaaggagcagtttccaaaagcaattgagtacttgcaaaatattttgaagttggatccgagcaatggcgagacttggggcagcctgggccactgccatcttatgatggataatttacaagaggcatacacctcttaccagcaagccctttaccacttgcgtgaccccaaagtaagccgttttcccttaacattttccctcgaatatttctctgattcaattctctcattaggaacccaagctgtggtatggaatcggtatattgtatgatcgctatggctctctggatcacgcggaagaggctttctcgcaagtgatgcgcatggcacctgatttcgaaaaggctaatgagatctacttccgcctgggaatcatatacaagcagcagcagaagtttaatcagagtttggaggtatgtgaaatctcttcatatgagcgagagctgtcactaactcatcctagtgcttcaaatacattgttagcgatcctccacgccctctgaccgaagaagacatctggttccagattggccatgtccacgagcaacagaaagacgtaagtcatgcttccctacactcttgattaccttgtactcattcaatcctcagtttgaatctgcccaatccgcgtaccagcgcgtcctggagcgagatccaaaccacgccaaggttctccagcaacttggttggctctatcaccagcagagtaatgctttccaaagccaggagaaggccattcagttcctggaaaagtcggtcaatgctggtaagtcacaatccccaggactatatacattgaaactaattcatcctttccctagataacaatgacgctcaaagctggtatctccttggtcgttgctacatgtccatggcgaaataccccaaggcgtatgaagcctatcagcaagcggtctatcgcgacggccgcaaccctaccttctggtgctcgattggtgttctttactaccagatcaaccaatatcgcgatgccctcgatgcttactctcgtgcgatccgcctgaacccttacatttcagaggtctggtatgacctgggcactttgtacgaatcatgcaacaaccagattgccgatgctctggatgcctacggacgcgccgcagatcttgacccgagcaacgttcacatcaaggctcgtctgcagcttcttcaaagccagttgtctgctggcacggctggacaacagccaccctctgcccccgcgcctcagccgcaggatgttcatcctcaggcttatcaggcacctggcgttggtgcacctccagctcctcagtggggtgcaccagcccccatcggtccccctccacaagctcctgcacccccgagacagattcctgactggaaccgtgggatcaacgagcttcagtctcaaaatcaagctcccccatctaacggccttgaccagcgcgacgctcggatccccggtgctcccgctcaaagccctcgacaggagcctggtcggtcgttcccggatccccgtggcgcgcctcgctcgccaaagatgggtgatcccaactcctacccgccgcctcacactctaccccagcttggaaatgcgcctggtccaagccacgaacgcgctcctagtggcagcaatgcctttggtgctccgcgtggtgctctgccgagtggcctgcccgtcgctcctcctggtccccctggacctcctggacccaatggcggtgctcctccccctccttaccagaaccgccctttcagtcctgctcctgagattcgccctattcgcgaggagcgtccctcttcgccaggttcaggataccccctccaacagttccaccccggtcctaccctccccccacaagttccaggtggtaactccatcgcctctggtgccccggcccctgcttcggctgccactgctgctgaggctgccgcccgtgatcgcgaagatcgccccgcatctgcaatgaagcgcggccgcgaatgggaagctgatgctggcccagtcaagaagcatgcaaatgaagagagccgggctcgtctggatgaccagaataaccgccgcccgagcccacccgctcgtttgccttctcctggtgagatgcaacgacgaagctcctcagaggcccgccgcgaggacgcccgtcgtgccaatgagaactatcacccctcagaagctgctcaccaccctcctactctgccttcgatccaagacatgcctccccgtccttctgctggccccagtcttcccccgatggccgagagctctgcacctgcacctaacgctccccccactggacctccttccgccaacaccccggtcaaggaagaagctcctcgtcctgaggctccccctgcacacgagccccccgcgcgtaagatggatgtcgatgaagactacgatgatgaagttgaggaagagaagaaggctgctgcttctaagggcagccccaacggcagcactgctggcaaccccgccaatggtgctggaaatgcccgtgccagtactccatccaagatcgagcctacggcataaaaatgattcctctcccaaccagactagtgtctggctaatcctggcaaagccgattccttgcttctcccttcctatctttcagtgtgtgatgtacggtatgaatgtgcgagttacgctgactgcgtagtttcaagcgcgtgcgctgaatactcatgtctgttcgttctcttcttatgatttcttagtctcctttcactgtgaatttttaatggtgcattaggcacccttgaagcaaaacatttgtttgatactctgaaatttggtagagtaaattcataatgtctcctttttttccctctgtaaggtccatatctcattccagcccacaatgtggatgtcctaaaaccatattttgctggccgtttgccttggcagcaggaagacccataaaactcgtgggcccggaaaatctggacagcacgtgactggaccagggctggattagataatttgggttattgtggggtgcctcaggctcagatccgccaagagtctcgcttaggttagcccacacaccaagcgtgcaaaatcaacttcgacatttccagatcgtcctcccaccacctcgacgactaacgataacagggtcaagatgtgagtctctcccgattgaagattcctatacaatcgccattgaatacaattgctgacctgctttcgtctttcaggagtcaccggaagttcgaagcgcctcgtcacggttcgtgatcacctttttcctcgatatcgaaatttcgaaatacggccactgtgtgtgtacagtatactgattatatctccaggctccctcgcctacctgccgcgcaagcgcgctgcccgtcaccgtggtaaggttaagaggtcagtactctggaagaatttgtgatttgtggatttgtgtgctgagactttttgcgacagcttccccaaggatgacgccaagaagcccgtccaccttactgcctccatgggctacaaggctggtatgaccaccgtcgtccgtgaccttgaccgtcctggtgccaagatgcacaagaaggagattgtcgaggccgtcaccgtcatcgagacccctcctgtacgttttccccgttgtgtgcgaaagtgaaggagacacaaaaaagaagggaccggaacctaatatctttttttccagctcgttgccgtcggtgtcgtcggttacatcgagactccccgtggtctccgctctctcaccaccgtctgggctgagcacctcagcgatgaggtcaagcgtcgcttctacaagaactggtacaagtccaagaagaaggccttcaccaagtacgccaagtcccacgccgagagctccggtgcctccatcacccgcgagcttgagcgcatccagaagtactgcactgtcgtccgtgtgctcgcccacactcagattcgtcagactcctatcaagcagaagaaggcccaccttatggagatccaggtcaacggtggctccgtcgccgacaaggtcgaattcgcccgcaacctcttcgagaagaccatcgacatcgactccgtcttcgagaaggacgaggtgattgatgtcatcgccgtcaccaagggtcacggtttctccggtgttacttcccgttggggaaccaccaagctgccccgcaagactcacaagggtctgcgcaaggtcgcctgtattggtgcttggcaccctaaccacgtccagtggactgtggcccgtgccggtcaggacggttaccaccaccgtacctcttgcaaccacaagatcttccgcattggaaagggtaccgatgaggctaacgcctccactgagttcgacatctccaagaagcagatcaccccgtatgttcccccctgatattttctgtgtgttttttaattctaacatttctctagtatgggtggtttcgtccactacggtgaggtcaagaacgacttcgtcatggtcaagggctccgttcccggtgtcaagaagcgtgttatgactctgcgcaagactctgtacccccagacttcccgccgggccaccgagaaggtcgagctcaagtggatcgacacctcttccaagttcggtcacggtgctttccagaccttcgaggagaagaaggccttcatgggtaccctcaagaaggaccttgtggagactgtttaagatgtttaagcctatggttggcggtagtgcgacgtttcatattcaataaaaaagcgaatatccttcacgatttgcatgtagatgtatactgtctagatttataaattcattccagtgtatggagaattctccttcaatgatatatttcttaaatcgatattttccgttgcttgatatatatctggttgggatgttgtacgcagccgaaatgttcagctggtcttttctttcccttccatatatctatcttgattacatcccctaaaattatcctcactctctttactcctcccaatataccatactccaatccgacaagcgggtggtgaacaaaatgcgccagtccaagattcattgcgtcatcccacacctttccctgccagccccgacaagaaaacgggctttgccaatctcatcctacactctacgatcaaccttccaaagagaacatccacaacaccaataccgtcttctacatcatctatataaccaaaccagcctaagaacccaccccacaaacgcagcgcaccaaacccgcttcttccccgcaacctcaagaccgcacccacaaaccagctcttcccccaccaagtcccccttctcaacctcaacacaagccatgtcctccgacgacgcctacatgtccttcctggacaaagcgaacgcagatgtgagcggcagcgccccacagcaagggaccggcaccgtcaaaaccgagaccgtgcacagctccctgtcagtgccaaaggcgctccagtccgtcgacacatactacatctcagatacagacgagcccttcgagcctgtggcattgaagtgggatggtgccgccaagggagcgtggcctagtgctggtatgttcctgatcctgatcctccttcatgaacttactcccttgaaaacctgagacaaaatctacaaccaccctgctaaccaccctccctcactgcagaccagctctcctccctgatctccccagacaccgacctgtcccagtccatctccattctatccccctcctccttcgacccaaaaaatcagtactctgccgctctagatgctgtccgcgccgcggctgtcgagaaggattctggtgcagataagtcagccgttgagctgaaggtctatcgtgttgaacaaactagtaccaagatcgagtactgggttctggcactacatgcgcctgagagccgtcttgtcggtttgcgcgccaaggctgttgagtcgtaggtgtccagactatatccataatgagaggtcttggggtcagtataagacataatattggttttgctatttgtctattctaccgaaatatgatatttttatgagaaagatcggtacggatttcgtgctgccttgttttttcgatatagaagcactggcgcggaatggataaacagggacctcatcctactttgcccttggtataagttggccctgacaggtttttgttcgggatttgtcgcattcttaagccccggggttggggtttgaggacgcgtgtcaatggctgtggaaacaagttgaattggattggtcaattaatgttgaaaggaacaacactggtaactagtcttgtacgtcgctgtttgtgttcaaaggaatcatatgtagatttatctagttgtatgttgtatatcgcgctggtagccggggtctcgggccatgtctctcatcttcctcgccgattcgccctttgcttcaacaacaccccgtgcatctatcggagcaactttaactgccattattactgtatttggacctctccaggttcatgaccgtggtgatccccgaattccagctagcattcatgccgggccattccttgggccctggggagcaacggaaatgccgcaccctagaatagccctacctagggcatgggagctaggatagggcttcagaccatcagcctatttcaatcaatcgaagcagacagtcaatgatataacgaagatgtcttgagctatcaaactgagtcttgaatagtatctactatcatccacggtccatcccaaaggctcgggaaaagagaggcataggcataccactggttgcccccttggacctctgtcattcctgtctcctcgtgagcccaaacaagacccctcgggccatctaggctcttcttttcttctgtgtttttggccttctttctccgttcagactctgtctcttttatcgtcgccgagggaaattcgatgctatccgacctgcgttcgttctttcgctaaaatattgcactcgtcgactgtgcaatataccagctttggtcttcagtctttaccgttgaaataattaggaaatcgctgggtgacgaatcggaagaaagaagaagcagaacatcacacccatctgctctgcaaatcccaccaacgactgatacaaaagggctgttctcgcggcggaattgaaggcacagcaaggcctcaccagtacagagcagagagtcgtgtcggacttacccaggaaacttgaaaatcgatcaaatgtcggaccacggctctgatacctcagaggggaaggcgatgcctcacatccgactcaactccgggcggcaggatcctttcctcgagtcaaatgaaggctatgcgcctctcacatcgcggacatttccccggcccttgacaccacagggagccgaagcgcctatgccggtgagccctcaagcgatatcaccatacggcgtatcagctgcccccgagtcctcggaattcctgctgcccccgaagttgaggcctacacagggacatggtctgactgacactgaccggaaccggtctccggatcggtggtctacggctcgctcgagtatcagctccatgagccgcgagagcactttccactttgatccgttccaggactcgagggcgccttcgcacgctggtagtgaggattatgatgtcaacacgcagactgtgtccgggaagttcaatatcatgcccactgatggattgttgttgtaccccgaggacgtggagaaggatgactacttgcacaacccggacccggcggacaaggatcgtgattgtgacatctggaatcgacggggtattttgaatgtcggtggtctggtggttttcacaataggtcttctggtgcttttcattggctacccgctcatgtaagaagttgctggcttatctgactgtctctccatggctaacagtaattgcagaacttggttggcgggctttgggaaacatccccatgaaggtatatgccaccctgaagacacgttgtgtttggatgttggagagcgaccattgttgggaaacctgcgccagagcttgattgatccagacacaccgaaagaggcatacaccaagaaaagcgccaatggaaaggagatgaagctagtagtgagttatttcataggtcgacaatgagaagtggctgacgttccattgtagttctccgacgagttcaacatgcccggtcgaacgttcttcgaggacgatgacccattcttccaagcagtggatttatggtacggagtgacacaggacaaagaggttagtataaaccatgtcacaaatcatcgctcaatcgctgacattgcctagtggtatgatcccgacgcagtaaccacagcagaaggcacccttcagcttcgattcgatcacttcaaaaaccacaatctcgagtatcgatccggtatggtacaaagctggaacaagttgtgcttcaagggaggccgtctcgaagccagcatgtccctcccgggcgatggacatatccaagggttctggcctggcttctgggcaatgggtaatctggctcgtcctggctatgctgctaccaccgatggtatgtggccgtacagctaccatgacggctgcgatgcaggcatcaccccaaaccagagttcacttgatggtattaactggctgcccggtatgcggttgcccggatgtgcctgtcccggctctgatcacccgactcctggtgttgcacgcagtgctcctgaaattgatgtgattgaaggcagcactgctccgctgtatggtgacagcggtccgttcgtcggtagtgcatcgcagagtttgcagaccgcaccatttgacctgtggtatctgcctgactatggtgagttttttttttatcttctccctatggaagacatccattaaccaaaaaactcagacttcgccgctgtttatgactcacgcgtcacccaaattaactcctaccgtggcggtgtctaccaacaggccatgtccggcctaactaacctgaatcaccgctggtacaacggcaccgaattccaaacctactccttcgagtacatacccggcgcagaaggagaggtgacttggttcgtcggcgccgagaaaacctggacattggacgctcgcgccatcggacccaacggcaatgtcgggcagcgcatgatcccactcgaacccatggcgctgatcatgaacatgggtatggcggataacttcgcgccgcagaacaagagcatcattgattttatgcccgccatcctgcgcttcgactacgtccggatctatcaggaccccgatgatgagagcgttacctgtgacccgccggggtatgagacgactaagtatattgagaaacatcgcaaggcatatgataatgcgaactttacgacttggtatgtttatcgctggtttttctcatttgcattttactaatgattgaactttagggacgaggctgggtacaattggcctaaaaattcatacatgcacgactgtccggctaattagattctatcatttgttgtctctttctatcctaaactgttagtcgttttagcggcattgtttgctggcgttattggggttgggcatcacattatattactttcgccattcatcatcaaccatttgattctcactctttcttcgtagagctcatctagtcttctctcacctcaactccaaccgtatgacgtaatgataaacttgatatctactaagcctagttagggggttcaacttcgcccattgtacaagctcaccgcctgctggatctggccacagtacggacacgccaagagggcacgatatctcaacacgttgaatcgttataacttgccttctatctgcagtgccgtgaatatgtatctttgaacttcattcttgaggtagaattgattcctgtcaaccaacccctcttccggaggtgaccagtctctgcccttacggccaatatctctttctcatccactgacactagctatagaaatccggggtcatacaataggatatacatgaaattatctgccattcatagatgtgaagcacattccacagaagaggccttttattactcctattttcaccagtcattggttgcaccccacacatcaacttaaaccccccctctcgatcacttgcccccgacttatatcccatatccacatcttcaccatgtccggcggacccataaatctcatctcagacacagaatctgaatcagactccgatggcggcatgcaactcgacgacctaaaccgcgccgacggcataccaatgcacaacaacggcgaaggtctcgaactcagaaacgtggacggcataccaatgtcccgccctggatcaagcgatgatgcttggaacgtgaatggaactacatctggatcggacacgggtatgtcttccaagttccaccatctcatctctatccatctccccgaaccaagtgaatcatagtccagtatacaaactaacaccgcgaaaaggaggattccgcgaccgcgccccgaaccccctcacggcatcatacaatcgcgccggccaaggcggcacggagtctcaaaccgccttcgagaaagacgctcgcacacgcccgcatctccgcgacgagaaacacgccgcgctggccgtcctcatggacaatgagttgttgattacgtatgcgctttcctcgagagaagtacgtttaccaccctgtcctgtccgatcccagccactatcactattacaagtacaagtaaattaaactaacaaaaccagacaatcccccaaacccgccgacgcttcctagcaagatatctcgcgcccaacgacccggacaaagcagaagaactgtacaacccgcgcttctacatcgcgcctgacgggaagggcggggagggatcgcttattcgtggtcggtaccgggagattattggggatattgatgatcataactggcataagccggggcatttgaggaccttggatgcgaaaaagacggatgctaagagtaagaagagcaagagtggttcgcggtctgtttcggtggggtctttttccggtgcgaattcgccgagggtttctgggggtggggatgaggagaatctatgagttatgaatatatgtttcttggtcttcaaggctacatagactacagactactaatgacagatgataatataatgttatattcgctaaaacacattagaataaactactatacagagaagcagatcaacgacagggccaccaacccagagaaagaagaagagaacaaaaataaagataaaaggggtatcatcgaggggatccaaaaagagaagacatatgtagcttctctgttctttttgtgttctctcctccttcgatctctgggatattacccgaagactcaggcaacgcggtagcactgcagtccgacttgcgaactcatctttgcattcttgatggaacagctgagctggtcacagatgccatccgagtcggagaaaaggaagatgagatataagggtaaccaatcagaagacagggtagatgccaaggcttacatctctttctcctctctcctccgttgctccgagtggaacagactctcgatgtctccaacctgcttacgctccgagacttctcggttgagcatgcgagaataatgggcctgggcattcatcagtgtcagtcctcgagacggtacgggatcgtattccgggtcattgtaaaaaggttgcaggcggtgcgaggtggtgatccggatccgaccgtctctcatgacaggtgattgtcattgcaaaggctctgagcttgaagagaggcggttgagatggaggtagacatcggtcccgtagctggagatcaattagcaagggatcggacagtttaagcagagaataacatacccctccatactgatcaacttcaaatcaccgccaaagtaccgagcgtatagtcggcttactggtaggccatatccaaatccagccatgggtgctttgaagtcgttcttgtcgaaatcagggtccaggttgggcgtttgctccactgtcgtgtacatgtaggtccatacgagggggatcgacgaccgggggataccaccgccctcatcggagatcttgatcgtaatgtcctctttgccttcggctactattaccttggtcacggggaattcatccttatcggccccatgtgcttcaacgaccgcccggagcgagttcttgagggtctcaaagagcatgtgcgataggtgtccgggaacatacataaagttcaagtcctccttgcagaccagctgcaccttgggcgactcgaaaagaccgtagtaatcctcgcagacgaagcgggcgttttcaatggcctcgagcgcgatgtcgcgaacgttggtcttagtacaaattattccgacataattggggtgtttgacatgcgtttgttccgtgagtgcgatgtgttggccgataagcattcgtataccgatccttgacatgtaaaaccggtcgaggaaggactgaatcgtggagtcgatctgcatgcgctgacgcgcacgtttccattctaggataccttgcgcgacggtggtcacaaccccgtcgtggcgtcgtttgatctgttgaagggtcttggcgaatcgttggttgtagtcgttgagttccggaggccagtttccgcggtcgtcggaggggaagaagtaccgtcggcctgaggcggcgggtgacctagcaacaccatttccgttggatgcagtcacggatgaccggtactgtccttcacgcacgctggggttttgggttgtttcagagaggatttttgacgggccgttcatccggccgggtcgcaacaggcgtgctttcacttcctgagtcagagtggggcggggaagagcaatgatttcctgatcgggtcagtatatggatccgggatcattattaattggtgagtcacatacctcgaatgattgcgcataccagtcctggacctttttgatcgagggcatctcgctaagtccatctggaagctcacccagatcttgcacgcgatgtgcgagacggatcgggagctcctcagacaggaattgagaggcgcggaatagggtacctggatgagagttagttatgtaactgtagatagcgcagacccgttcatagttcatacctgttgagggacggtccccaaactggaccatctgtctcagcgagacaccggttgcggggaagctggcataatgtctgatggtgtccatcagcctttccgagggcttccacatggtggtgatatattggccgaatggccttggaattgtgttttctagaaagtgatctatccagagagaagttgtcgaggaggaagtgtgagtgaatcgagtcatcggttttcactgccgaggttgaccggtccccgggttttctccgcctctccgcttgcgctctccggggaccggaggaagatcacacgacaggaataagcaacgtatgatttgtatcttaggaatgctggcggactgattttttgctgggttttctgtttttctacttcttttttatattaaaaactacattcacaaaggagaagtgttatattggagagactatgcgattctgaaagtccgttcacccgtggtctatgacataattgtgtggcctcaggcaggaatcacatgttagatatcagctgatctgatgttggggatgtcggggatgatatccataccactcatgtctttctttctagctattaacaaactaatggtaccttaaacacaatatgaatcacaatcattccaattatcaggtctgcattgattttattaatggcattcatggcttattgaagagaacgttcggtctaccagtatgtgcctgaagatagaatgagtcataaacatactaaagaggctcactaggtaaataccctggttgaaccaattgcgtatgatcctaagtgcccctttaaatacaataactttgtgtatcgcgtctctctgccgtctccactcgacaaagagaatggtgcctggcacaagcccggttgtgtggctattccttccggcgttagtgatctgatccttcgtctgacaaactctgatgctacatctatgggagcagcgaatcgtgtcgagaatgaggttgctatgatgactctagccgctgctgcgctagacccaaatttcgagccccgcgttgtgcctcgcctgtatggctgggctggaatcacatctaaaaaaggggagccacagcaaggttggatcctacaggagctcatgccaggcgttcccctagacgaaaggctagataacatggaactcgaggagaagaaagaaatatttgcacagatcgcaaagctccttaaaggccttcaggacttcccgctacccgcctctattactaaatttggaggacttacatttgataacgagaacaacataatcagtgcaccaatgaccaccaccagtactggtccctggccctcgtacgaggctgcatttgaagcacggcttaagcaagctccgaagaaaaccgacgagaatccttatatccagggctggcatgagaatggcgtccccggttggaggcctttatagagcgagggctcccggaatctttcaagcaacttgaatcgcacaacgacaaggcaataatccacgcagtttttagtaagcatatttcccttgcacctcccgaaccctacccgcttgttcttatagatgttttctatcagcacccaacaatctgtgattcaacatttcctcaggtcgcatcacaggattaattgactacgacttttcgtgcgttctccatccttcatacgagttcctttgctcctttagtggggttgggggcaagtttgggggctggccttgaggcccgtgaagaaagggccctcaaggaagccaagttacacggcttcccagaccctcttcccgatgaccagcaaggtagcgaggaagtacagtggaaagttgccaaggtttgggaagacgcccttcagaacgagggttgcaagcgcccgataacaacctcagggattgacattgtcgccgatgtcgatgccctgcttagttctatcctgccctggcgcgtgacaaattcagacattctgaggaggcaaacttgtcaagtcattcaaaactgccgaaatgagaacgagaaagtcctgattgagattctggagcatatagggttctagaattattagcagaactctttcgggtccgatttaagccagcgattcacttcgagcctcgccaagctgttgatgtttcatttgaattctgatctatccagttggtatattcaatagcaaggcttatgatataattaaggaatagcatatgtacttagggtaccggacatcacctacagaagttactctataaccaatgaacacgtgactgtgactccgactttgggaagtatacgccgtaggaaacgaaggatatacaaggacactcgttcatgtgcttggtttagtttttcgtcaatcatacattgttacttgcgtttacctttttactgatgacttccttattacttaaacacggaggactcggttatatcatgcataatctcacgtacttttgtcaaccctgtcctctcgcccccttttagcccttccatggccatcgctaagaaaatgaccagccccgcggctatctcgcattggcgcaatcactggtcttctcgaagaacactccgttcatatcccatccttgatagagaagaaaagagagggaaaagtcatcggatgatgcaacgggccacgttcccaccgctacccattcgcccgtccaacagatccgctttctggacactcaagattctcttttcgagctcttgctgttgtcgagcgattattatctctgactggctattatttagcccctcctacccttttttgtgtgtgcgttggcgaaaaaaaaatcccaatatccccgaaaagaaaaaaaaaaaatacaatcaattctggccctaaaaaattatctcaaatctccaaaacctcaaaatcttcatctcctcaattccattgacaacccgtgcatcggtgcctcgaatgttgaaccctctcccggcctatacatagggaggaaaaccgtccctccgaaaagcgatagatatataccctccggaatccacaatccacacaaatgtctcgccgtcgaatatcgcacagcgaaatgaatgaggctctcgcctatcccttcatgcagtccaacggcccatacaacagtcagtcgaatggacaaccccgtcgaggccccatcgaaggtcccaatggccgtcgcctcatccgtcgcgtcacatggcgctcctccacatacaagctcatggccaccctgtgggtgctggccgtcctctacatcgtctggctagtccgcgacctcttcttaccgtccaccccgtccgaatccagaccaacccctcctgctcaacccgaacaaaattaaaggcgctgtgtgtgggcccccctgggagggggcgagaattgcgtcttggattgggtcgtttctgctgccggagtggggggggttgttttgggggcccattgcgggcttttgagcgacatgtcgggctttctttttggcattcccgtatattattcgggtcccgaggagttagacttggagagctcttgggcagggatgcattgcgcttgagggatcatgctttttttttttgttttggttccgggagagatggcgctgaagatacgtccacattgctggcttgtgtggtatccggagattctccgggctaaacctactggtaatggcgctgttggggtagttccggatggagccctggagtgttctgcttgtcatatgcgggagtcgactagtagctctctccttttggacttctaccgactatatctgcggtccggcgctcaattgacccaaacagctttcttttttcttttcgtttgcatgtcagcgttctattgcatatgggtatgattaccatacaggccgatagcctgatcgagcatttccgtcttctttcttattctcttattcatgggcggttcaattgtcttttttttttccccatacagcaaaagcgttgatcattttctcattctagaatgtctgttacatcctcttcccgctctgacgtccatgacactccccaaattgacccctcccctatctcaacccctcgaagatttggagcgcggggcatcggggaagcagggaagtggggggggaaatttccctctgagagatatccacaagtggaacataatgccttgcattcaatttgtatacacagtgactcccttctctttcacctataggaaatcccatatctcccatcgtctttttatatataacttttcactttctaacagatacacagaatacgactgtactaagggtaccttaaacgaacagggaagaggtctcgcccttggcaatggtgctcgcgtagggcttgatggccgcagccacctcggtgctggtgaacttctcgacctgctgaggtgcgcggccgacgaaggtggtggcgtcgagaagggtgtccagctccgggatgatgggggtgaagaacgcgttgcggcggatgcgctcgatgaggtcgttgtccttgccctgcttcttgacgttgtcggcagcttcgcgggagagaacacctgcgtacgttagaattccggtttggagaggaagatacggagagaaacttacggatctcctcgtgcgcgtcctggcgggagagacccttggcgacacaggccatgatgatgttctcgctgagatatgtgttagcaacatccattggattcgttaaagatgtactcacgttgccataaaggggagctcgtcgttgacgtggcgcttgatgacctcggggtagacgacgaagccggaggaaacgttgtctaatagtggtcagccataatccgagcttctaacaactccgaaactcactcaggaggatgagacaggcgtcagcagtcaggtacagctccgggagactgatacggcggatagcactgtcatcctagtacaaagttaataaatgattctagacacatccgcggtatactcacaagagatcgctcaaaccactgagcggagtaggtgtccaagcagtccttgggaaggttctgcaggtgacgtccgagcgagcacagacgctccgagcgcatggggttgcgcttgtaggcctacaaataatcagctaaaggacccaacacaacagacaaacaaactcaccatggcactgctgccgatctggtccttctcgaaaggctcctcaacctccttgagcatggcaaggtgacggatgtcaatgccaatgcgctcacaggtggaaccgaaagaaccaagagcgttggcgacatcaacatcgatcttacgcgagtatgtctggctggagatgatgaaagcggagctgaagccagccttctcggtaacaagctcgtccaggctctcaaccttggcgtggtcaccgtggaagatctgcaggaaagacgcctgagtaccggtggtacccttgacaccacggaagcgcaggtcattgcgggcacgctcaaggttgcgcagatccatcagcagatcctggatccagagacaagcacgcttgccaacggtcaccagttgggcgggctgaccgtgagtgaagcccagacaagggaggtccttgtactgctgagcgaactgggacagcttgtcgacgacaacagccagcttggggatgaggatgtcgagaccgtcgcggagcaggatcagatcggcgttgtcggtacagtagcacgaggtagcaccccagtgaatgataccagcggcggcgggggcaaccaggccaaaggcatggacgtgggccatgacatcgtgtctccggcgcttctcctcctcggcggcaacggcgaactcgtcatcctggataacctcgtgggccttcatctgctcgatagcctcggtggtgataggaagtccaagctctgtagccaaaattcagtcaattgatgtgtttcatcaactacctctgatcttcgacactcccgtaccttgttgggcctctgcgagccaggtccaaagctgtctccacgtggagaagcgcttccggggggagaagaggtacttcatctcattgcctaatcaattgagtatggttaatcccgatttgtacaatttccggggttgcccctcctatagaggggcagttgggaccgacttactcgcataacgcgagttgaggggggtctggtagacatcgttgcttccggacattgtgtcggtggttgtttgagatactcaaacgaagaattgagcaacgagacggacgataagacagggacaaggcgatgtgcgggcaaggaattttgcttgcggcccggttttagcggggcttatcagtcacgttatcgtatgatctacatgtcacatgatatcatacgttctatgggatgttttgttgatctaccagtagggaaagcaggcttggtggtgcatacattattatgatattagctcgtatagatggagtcctttgtgtgatttcactctccgctccagataatcaagccaactgcgccagctgtaccgataggcttgccttgtcgtacttgatgtatttaccgcggcctttgtcgatctcaacatatcgatcgtaaaagcgcgcatacaagggctcgagaacagtttgcagctcacgagttagtaaagagcgcacctcacgctccatgtgaagggttttgtgccgagacaccatatcctcgaagctcgcgttgaatgctttgaacttgtccttgatcgcatccttatccttggatgacagggacttgacgatggcgcttgaatccacgttgccgctagaattgcgctgcgccccgcgggaggtatactgcacatcaagaaggtactgggatgtttccttccatgcatccagataggtagacgtcgcgcgcttgcggaaagtgtcgatccgggcaatactgtcggggttacccaaataacgtgccagttctgggctctgtcggatcgaccggtcgaccacgcagaacacgttggacaagaacacaccaagcgctgccttcgatcgatggaaagcccgacctcgaccttccagggaggtcatcaaggcctcgatcatatctagaatgaaatgcgacagaagtgtgctgctgtctggacctacatctagaggagccgagccagcggtgttggacttggcacgccagtttccatctcccagagacgtcaagatagaagccaaagggcccgagtaccccgtcagtgtggccaatgagctcatcacttcttccacaagaggcaccgatccaccgtccggagggagcgtggtattagcagccttgcgcttcgtttcctcgagcaattcggaaagagacgacttggcagtctcgcgtacaggtcgaagagcctcgatcaagaggctcttcagttccgcggccttggagtcaatccgataggacatcgcggtcacaatttcgatgatctcaaaagccaagaagcagtctgtcatcagattggtcttgatatactgattgagctcacgaagtgttttagagtattcgcccatagccgggaagaacgtagcctgcaacgctaggccctgctgatctccagtaaacatctccacaataataccgtgctcggtagttataaaggcctccagcgcattcgagtaaataccaataccattggtaccctgcttgtatgggccatcggtgggtcgccgtttgacggtattgagggatgcaatggcaagattctccaagctggatgcaatgtatggtccccgtacttccgcataagccttcagcgcggggttgtcccccttcccgcgctgagatccatgaacggatgccgagccgactgccgaacacaagggcgccatgtgggtgacggtatcttcgggtatggatgggaaggggagatctagaaccgtcgcacattagatctgatttaggtttcgtttggtcgtgatacgcgtacctttggtcaaatagtgtaggggctcgaccggagtggaatgctggctcagttccccccgtagcacttcttggagtttggtgcttccggtgtttagaagagagttgaagtcggcgatcgcattctggtttgatcgcaagtttgttgtgttaaggtcgaccagcgccttttcaacacgtttcatcgcccctaggtagtgggtgaggccggagctctgtggtctgggagacgatcagcaaaagactcagactatatgctcaaagagattagaagacacataccctgcgcgaatgattccatcttctcggttctttgcatcgagaggctggcgcaggcgatcgatggcgtcgttgaccttgtcgatattactgttggtgatttgaagggattgggtgttgctatagatgggaccaatggcttctttgacaacttttcctcctgtctccaggcgtaccatggagccttgtatcttcttcgtgagtcggttgagcttctcgaggttggcatataggacctcgacctccgcgctctcctccgcgtaggcggtattccttggcgccaccatggttaattggaaaattaggcaaaatcaatccagagagaccatatcacatgtcaccaggacccctcatgtccttcgcgggcaaacggaattgatcgatcaaatggactgattgtccctccagctccatccagtccagtgataaggagctccgccacgctagtccaaaagaagtcaggcccagtccggccttgtcacgtgaatccacgacgtcatcaacccagggcttgttcacaggtagcttgcaagaaaaggcaggcggggcttttgcagtccttcaatggaccccctggatgcagcaggtctcgtactttgccctaaccttcccgttcacaatgggcactgcaaggaccactcgtctgtggacggtgccccctgctgccctagctgcatacactgcgggggaatggtctcaacccagacaatcaagagctcaatatactacttctcgaacacgatacagcaatgattcagagtctggaaagtccaatgcaggcaaagacgatggatccatctggaacaacatcagccagaagctagatgaggttaagcaaaccgttggctccgccgagtgggcggatgtggggaacatcacagactatatcatcccagattggacgcgatttctaccagctactgccaaaaagctccagcgggagctctccctatctcccggctcattggcagacgatatttggagggaggcacaggaccctgatatcaaccctgagattctccgcgacgccaaggtacgagtaagtgaggatctttgcaacgaagagcaggcatttagacggcaacgacaacggaaggttgtcaaagcattgtcatcttacctcaaaatacccgtggaggacatccaccccgaagacgtaccggtcattgcggtgtgtggctcgggaggtggtctgcgcgctctagttgcaggcaccggatcgtatctggcagcacaggaagcaggtctgtgggactgcatcacctacacggctggtgtcagtggcagctgctggctgcaaaccctctatcattcgtccattgcgcagcaagacttcgacaagcttgtcgaccatttgaagaatcgtcttggtgttcacattgcattcccgccggcagctctcaatctcctcactactgcgccgacaaacaagtaccttctcagtgggtttgtggaaaagctgaaaggcgatcctggtgcggactttggactggtagatatttacggattgctgcttgcagcgagactattggtcccgcgaggagaactgggagtctccggttttgatttcaagttgtcgaaccaacgagccaatttgataaatggggctcatccgcttccaatttacacggcggtgagacatgagattcccgtcgaagccctcatacaaaaagatcagaccaagaagaatccaacgcctgaacagttggcgaaagagtcgcgacatgaagcatggttccagtggtttgagttcactccctacgaattcttttgtgaagaactgaatgccggaatccccacctggtctttggggcgtcacttcaacgcaggccgctctgatgtttccgctgacaatctccccatcccggagttaaggattcccgggctcatgggtgtttggggtagcgctttctgtgcgactttgtctcactattacaaggagatccggcctctggtcagcggcctggctggatttagtggaattgattctctcatccaaggcaagaaccaagacttgatcaaggtgcatcccatagaccctgcggctatacccaactatgttatgggcatgaaagatcagctgcccgactcctgtccggagtcaatcttccgagacgagcacctgcgtctcatggatgcgggaatgagtaataacctgccaatctacccactcatccgacctgggcgcgatgtcgatgtaattgtcgcatttgatgcgtctgcggatgtcaaacaggagaactggctctctgtggtcgatggatacgccaaacaacgtggtataaaaggttggcctgtcggcgccggatggcccaaacattcgagcctcaaggataccgagaaagcactgcgcgagccaaataacatcaccgaggggcaattgacagataaactcgccgacgctatggatacctctgaacccccacccgatgatcaagagcccaaggccggcacagacctgggctattgcaacgtttgggtcggcaccacagccgagcgaacctcgaacgacgagcctccgccatccaaacgcctatttgattcttcctacaacgaaaccccctccgaatccgagttccacctgatgcgcccagatgccggcatcgcggttgtctacttccctctgattcccaatccttccgcaccggatattcctcccaaacctaaaactcgtccgcgcgcagctgctcagtccatgcgacaggatagctctcaaaccagagatccggaactgcctcttgctccacagcccaactcgatcgacccggaagttgatgatttcctgtctacttggaacttcatctatacgcctgagcagattgattctgtcgttggccttgcaaaggcaaacttcttggagggtgaagagcagactcgtcgtgttatccatgctgtctatgagcgcaagaaatccgatcgcctgcggaaggaggcggcagagcatcggaagaagatggaaggctttgtgcctctatgattctcccgtcaacttccaccggacaaaacacgactttggtcgaagctgcatttaatactacattgttgtaaatatagacgacactttttgacatttttacctcgcatacccatggcctttcctttcattttcattttcagttggtttgagttagatagagcttgacctagacctttcatttatgtatatagtacagagcaaacgacctgtgacaatgatgaagcatagaagagatccaatggtacattcataaatgcactatgcactatgtattacttatgcacttgtacaagttctagctaataatttcagagctctgatcggttttatcctgttgcagcaccattcttctcaaaattcgtcttcactccctcaagctcttcactatgcacgctcttgattttggccttccggccctcatcagtagtcatctcatcgtcactcccagcaagactaacatcctgactgtcacccgtctgcttccgcagtccaagttccttctctagcgtatgtcccagcttcttagtcttgtccgagatacttgtagcagtacttttctgcgacgaagtctcagaaggaggctggttctccttcttatccccgtgcggcattccgcgccagtcagccggctcgcgttcatggatggaatcaccaggtttgggctcgctgatcgctaccggcgcgctatcttcggtctttttccctttcccttcgctcttgatagctgcgctggcttccaccgtctccgtcgcgggataccgccatacaactttcagcttgtctaacgcccggatccccttcctcgcactccccttgatcccatccatcgcctcccattctgtctcgaagacgcccgagtcgtgttcggcgccgccttcgaaatatgggttgaaccatacgtgtgcgatggaggttaccatagcgaagccggtataggatgctttgctgcgacgctcgaagtcgatattcacatccgagctagggacaatgagtggcttgtggggtttgtagagaattgctgagatactgtggtcctgcgacgataagccggagatatcagatcccgataccgtcggggacgaagtcgcaggcgagggaattggattcttgatcctggagtccgagttaggatctggcttggtagcctcttgttcctcagacgtcgagcccccgtcttcaacgacggtacgctcgttccgatggaacagatgaaaacacttaatcttcttccccccgtccacatagccctccacggcaaccttaaccccatctttcaagccccatatatgcacctccaggatctccaccggccgctcgacatactgcttccccagctcattcgcccacttatcgacatacccgacataccgcagctggctggggatgctaacgccgctcccgaaaccgacccgcatgcgtcgatccgtaaaccgctgcagcgcgtcttccttcttccacccttcctgactaatcagatatgcacacgcgatcgtcccgctacgccctttgcctgctttgcagtgcacgacggcgacccgttcgtttttgtctgtgtctggcgactccttgccctcgtctagccgctgtagccagttccgcatgcttcccattatgacggggacatacgcgaatggcggtgggtggtggtctggccaggggaagtggtggattcgtccgtagacttctgagtcggggtatcctgtaccttcggcgcggaactcccagatacaccattctttgccatgtttcgtgtcaaggaagttgactagtgcgtctagtgggttgcggtaggcgcgctttgggtatgttgatgatggaccggaggttgcgatgactgtggagtatgttaatgggtgtgtgtattttggtgtgggatcgataaggatgctaccattgtctgtcacgtaacagagatctagccctgcttctgggtggtgttgtcttggacctgcaactatctggcggagaattgatgactggcacattccaaggttagcagtgggacggttactgagctcgagctggcataccattgacagagtgtataggtgtttataatttgtatattccaccagaaatatgtggtagaaaagataatatccaaatcaaaacaagcacggggagttctgttattttcgcggatgatgtcatccggtgaattaagccctcttggctacaggtaatctactaactatattcgaccccggacctttatacaacaaatactactgtaacaactatattgcagcaagaaatttaattcctttgtacaccgtagagtcatagactaaatacacaaaatatttccatcagaaaatccagaaatttctaattgagccacatgtcgcgtgcccatccaagaccaattgagaccatccatccattacattagaaaaaaacagccaaatccacgcaataaaaagcatcacaggtccagactagtagcaacttatgcaatgccatactcctgagtaggcttcataacaaactgaatcgggttgtggtcagggacggtaacattcttcgcgccgtgctggtaccaagtcgcgagggtattgtcactgagctgggatttccaggtgtgagtgacatcgacattccagaccgggttttcagcaggagaaacaatggtcgtgatgttcttgtcgtcgcagaggacccgctcgtctgtgacgccgctgcagttggtgcggaacttgggggtcattgtgttctcgcggccgacaatgtcgtatctgtagacacagccgcctggggagcagcctatggtgaagttggatacgccccagatgatgtcgtcggtgatggtcttagtctgtaggctggcggggcgtgcactggctaggccggcgagcacgattgggaggatggtggtaagttgcattttagattatgaaattgaattgtttttggtagagaagagtaggataaataaataaacaattgagtggtaattgggtggttgaatagatgaaataataaggaggaggtgggaattatatacttaagaggcggcaggcgtttacccttccctgacggccgcccttggcactcggaaactcacgccgatcactttcaggggaatgtggtgaatgacctcccaatattcgatacaagagaactcgcttggtttctagaaagccttcgagccatcgaatcaatcgcttgacgttcataaagggtttattgtccgacaagttaccccatgatcgtcatcgaagtctttcagcctgactatttatagtacatggatccacagggaacagggttcatatcaaggcgccaggtgtttgcttcttgtgaagatgatttgagaacagaacagggcagtaaaattggctatgatgctggggcaaagttgtgggtaatacaagtgcgaagagaggatatatacatactgaccgaagtcaaaaattgtgtgacatgcccaagggataattggtggtcttgaggaattgtgtggcgtgtattagctgcagattcgaggcaacatgccgtcaaggaaatgattattctgatcgattgccctcgagggacaaaggattccaccagttgcacagttgcatgtttcactagggcttggcagagccattgtcggtgccactggcttcccactcatcccagccctcctctctcatgttttgctcaatggctagacgacggcgtttcttctttcgacgctctttgttataatcacgtcgctgctcgtccgacatgctcagccgacgaaccgctggcggtacagggtgccaaccggctttctcgttcgcttctttttccctctgtttctgctgtagctcctcatctagcttcttcacatcgtcccgaatgagagggtgatattgcagtcgcatcgcaaactcgtccacagaccccgcacagatctcacggatttccgcctgcgtttcagggctgagactggcgtcccgcttgatcaggtcctggaagtacataaaaccggaccggaaattccctgcatccaaacacatcaggatgatagactcgaatgtaacaccgttcggtaccactccaagtgatgccatctctttcaccaggaacatgcccgattcgcggttgcgggccgttcggcacatccgaattagcgcgttgtaaactcggacgtcggcgccttccgggcataatgtataaagctctttgtagaacccaacaccgtcgtccaccacagatggatcatcatgggcatcatgttcacagagatccgcgatgacacgtacagagccgatgggaatggttcgtttcgcattcttcaaccgcttgagaatctgccacgcctcccgacgatcaactttactctgtatcatatgcgcaagaacacgctccgtcgagctatctgttaggggaatatgagcttcgtgcatggtgcaaagcgcttcgaacgcagcaggcagattgcccgctgtcacgtgcgtctcgacaagtctttcatactgtgtgcgctcgagcgggatcccactctcaccgaggtaacggaacacagagctcgccatctccgtatcaccagcatttgcagccattttcaatacgtcatcgcagacttcaatgagcggatgcatgtagcccagctctaccatccgtcgccacacgtagtgtgccatggggtaatggccgtgcttccctgcctcggtcaacacgtgcatccaaagccgatgggtcatgtcgtggccctggtcgacgcgcgcacgcatcacatcgtacacttcatccagctctccgtggtcgcaaagcgtgtagacaattatactgtgtagccagttttccacaaatatatccttgcgctgcatcaatgcaacgtgctcgagcgcgagctcgatctggttctcgcggagaagaccagccgccacaaaatgccatccggctgggctcagcgtgagccatcggtcgcggagcttgttgaggatttcttgtcgtaggaggtagtccggatgtacagctaggacctgtattggaattgcatcgttagtttcgctgcatatgtagctcgcttcaaccagataacctacctgcaatgcaccgtggagtgtcccagagtctgcggtgatgccattattctccatttcctccagcagacctcgcacaagctccggcgagcccctctcattatcggtatttgcaagaatcagcgccttgtagtggcgagcattcggcttgacatggcggtcccgaatgagaagtcgtaggatctgcgttatgtgtcgaatgttcggcttgttgtccattgcatattgtaatcgcgactcgagcccttcgttcgttttacctagaaggtcgtcttgcaccttatgtgttcgtgtgtatagcgggctctttcgtcgtggatgtggcctggcgtatgttggatctggagataggcgagtgtcacggaattcattctcacgtggctcccgtgtttcgctccaatcattatgatgtgctgcattatatgagaatttggaatcatcgccgcctgaggtgttgtagcatcggcgcgaacctgagctcgggctaggaatcgaaggtagtgggtatagcgggtttcgacccttggatttggggaatgccgttgaacgactgagactcagagctgtaaatgacggacaaagcgagtaccacagcccatcgaggaccaacgcccgccgcgacatatccgcttgtggctaactgatcggaagcttagcctccgcggatttgatctggagtttgatatcacgtgacatcctcgaatattcgcttcttggattgcgcgggatttacaatgaaataggtaagtcaggtttgggtttttggaacataaaatttagaggtagttgtaaatcgaccaagtgacccagatgccgtgaaaatacagagccagatacgccacggccatgctcgatcaaaccgttccaccacacctttcgagcgacctcaccaccgtctcctccgggggtatctcgtttgccgtcttcttaaaatcattgatgcagaacacacttatgtctaattggggccgcctcgtccccgaccacgtccaccgcggccgccaccaccaccccgaccacggccgcggccacgatcaccatctcgcccgtgaccgccgcgacggccttgtggttggttctgttgctgctctttaacaatttcgacaatctcttcgggaactcgtaggtatttgatctggtggattgttagcgtatagcctaaggagcggggctctgcgttgattgcgtgtcggagggcttacgttgttgccccggatgtagacttcgggtaatctgaagaagcggtcgccctcaggactcgtctgcactacctcgcgcagaatcaggttcatgaagttgtcgcacgtaaccaggtggccgttcagagtttcgccgttcttgagctccacgagcatagggtggccctgtgcggccgtgaggagaccgagaggcagctgatcataaactgacttagtataggtgtcggaaaaggcgtttgggtaaagctggagcttaccattttgaaatacgatcgaggtgggtgaaggtgggagagttagttggcgcacagagttgaaagagcgcgggttgttgcgtgtgtccaaagtttgtagcttatggattgaacggaggaattagacccggcactgttgatttatctggtgatgttgacagtagcaatggattcaagctctaagagatgcgatgaggaagccggaaaaagggaagtgccgagcccaaatgtggcttgggtgccatctactacgaggaaccttcgaattctttatattcttctatttacgtccattatataccaaaagcatagatctacagtttgacaactttcggtaacataaattagggggtatcgactagaattgagcttttgaggttgcacacctattggagagaagattaatccgttgacttcgaaaacatcctcgtgtgcattacatagtgcataagagaactgagcaccgcaaggcttaaacctttggtcgcttagctagctgtgtcccgtcctcctcctcgtcgtcatcatcatccataactgtgagcttgcgcttgacacgccggtctcggctaccggtaggagccttgctaacttgtttgtttgcctcttcctcttcatcctcaccttctggcaagcggccctcgagcgcatccaatgtgatctcgtaaccctcctccacattttggaccgtagcatcaagtttctccactcggtctagaagctccagttcgttcaaaagttctttgttctttttatagagacgttgcttggttagcatacgccaccaatagtagcgtcggtcatcctcattttcggccttgtacttcttgattaacagtcgggcaaggttagtgccaccggccaggcggtggctttgaggaatctgaccgagaagatacatctctagaacgtgtgcgaactgcgtaggttcgatcttgaacgatctgcggatgtcatgtagaagcttggtagggatgagggcggaagtaggcacattgcgagggcgtttcttttgagaatacgccccaaggggatcggggttgagattcacgttgtgcctcaggaactccggccgcagcagacaataatcggctgtatcccggagagcgtcgaactgttcattggggtcttcgatggtcaattctagaatggtcggatctgcgatgcaggccgcgtggattgtggtatataggtgtgtgccgtggccggcgcggtggtgtggagggagaataaggaactgggcaatgcggagtcgtgcaggaagcttggcgatattgacttctggtaacgggaacacttcgttcttgaccgcgggcgtttgtgattgatctcgctggtaataccaatagcggtacgttgtggcatatccgacaatcgaatacgatgatgctgttgctgttggaggagtcactttctcatatctgtaaatcggattagcctcaggtcacagatatcagcacaagacaaacatacacgaaatataccctccaccggtcgagcgtccactcggggtcgtctgtctctaagggagttccagcttcgatgaagagggagacgagaacctgcatgcgatccagaattttccgcacttcagggtctgcaagtgatccagcccagacctcatattttcggtcctcaacctcgtagctaatgacaaactcgcccggaggcttgaagtctttcgcatcagggtcgttttgaacagctttctcatagtcttggagatcggcgaacgcctctgcgcaaaatgtggttagcttatatcgcgcccgctgtcgcacaggccaaactcaccttcttgaacaaagggtttcaaagtatcgagaagatcaacagcagctgtgtcaccgacggacttgaacttctcgtcgtaagaaatatgaacatgagggcgcaaatcatgggcggcgaagcgcaagcggataatcaagcccctgtagccgaatatttgctcatcgtcgccaaagataggataggtaaattgggggtggaaggttgaaagtgttttcggcttcttctcgccgggttgaatgatcgtgacgtgaaccgcatcgttggcgtcgcaagaccctaaagtgaatcctaatcagcttatatcttggcagcattagatagcgggagactatgaactcacatccagcttcgctcgccattttgacaggatatgtggagtttgaatgtcaaaagagacgatgaaggatctgaggtctaaagagagacgcgaataacgcgccccggcccaggcgcgcatcagtattacctaatctggatctatggcccgcctagctctagacggtaataaaccttgaccagtcactactattccgtacgccgtaataaggattgaatatctcattaacagactgtctaaggaaaaggctctatggctccagctttacgcacaaattttggaagcctctgattccggactattcacaagtataagactcggacaagacaagtgagaaaatatatcagggaggtcaataccactatttacaattcaggaagctgcgagtactcggatagtaacagaaaagaaccttccaaggaaggggctaagttggaacactatccagcttcattctcggtgatgatatagacgctagttgccaccactagacatcggcaaagcccacccggcccatagcccagcccagccccacccccccaaaggccgggggtttgggtgaactnnnnnnnnnnnnnnnnnnnnnnnnnnnnnnnnnnnnnnnnnnnnnnnnnnnnnnnnnnnnnnnnnnnnnnnnnnnnnnnnnnnnnnnnnnnnnnnnnnnnnnnnnnnnnnnnnnnnnnnnnnnnnnnnnnnnnnnnnnnnnnnnnnnnnnnnnnnnnnnnnnnnnnnnnnnnnnnnnnnnnnnnnnnnnnnnnnnnnnnnnnnnnnnnnnnnnnnnnnnnnnnnnnnnnnnnnnnnnnnnnnnnnnnnnnnnnnnnnnnnnnnnnnnnnnnnnnnnnnnnnnnnnnnnnnnnnnnnnnnnnnnnnnnnnnnnnnnnnnnnnnnnnnnnnnnnnnnnnnnnnnnnnnnnnnnnnnnnnnnnnnnnnnnnnnnnnnnnnnnnnnnnnnnnnnnnnnnnnnnnnnnnnnnnnnnnnnnnnnnnnnnnnnnnnnnnnnnnnnnnnnnnnnnnnnnnnnnnnnnnnnnnnnnnnnnnnnnnnnnnnnnnnnnnnnnnnnnnnnnnnnnnnnnnnnnnnnnnnnnnnnnnnnnnnnnnnnnnnnnnnnnnnnnnnnnnnnnnnnnnnnnnnnnnnnnnnnnnnnnnnnnnnnnnnnnnnnnnnnnnnnnnnnnnnnnnnnnnnnnnnnnnnnnnnnnnnnnnnnnnnnnnnnnnnnnnnnnnnnnnnnnnnnnnnnnnnnnnnnnnnnnnnnnnnnnnnnnnnnnnnnnnnnnnnnnnnnnnnnnnnnnnnnnnnnnnnnnnnnnnnnnnnnnnnnnnnnnnnnnnnnnnnnttgtacagagatcagacgaattggtaaggtgatctgggaatagcttcatttttaatatttatggatagatcattttttttagtatttgtgcgtagattagataaactagtcaggtgatctaggaatagcatcatttttggcatttatagatagatagattagatgaattggtaaggtaatcatgttttttaccagactaaaacaagtgataaaaacctataatttattaatcttatataatctgacttataagcgccaagacctatataaaatacaaaaatgggctaaaataggcccattatgggtttatgggcttagcccactgggctatgggctgggctgggcctaggggagctgggcccatagcccatgtgggttgggctatgggctgaaatcttgggcccatgctgggctttgccgatgtctagccaccactacacctaatagacccgaaggttcaatagttattgtctagcatctatatcttgctgtaccttatctagcttgccaaaacattcccgaacacatcttggcgacgaatattaaagatgatatctagagtgaagttcgcaggctgtctttcttttaactttcattcctatcatgtattctattccatcgcttctgatctagtttccatttcccagctgatttcttcagttggggtatcatttccaaagctcgccggatccccgtcgtacgtcctattcgctccagcgcttcaacaacccaatcatgaacttcgtcaggaatccccgctgcgctcccggcaattcctagtggaaaaagtagcatgaatgtaccatttaacagtggtatatctgacgggtcttcattgactccttgctcgaagatagcttcctgacttgcagttccggcgcatatgtcacctgccatgcaagaaatcgtgtccaatgcttgccgccgttgaattacatcgtctgcggtgggtcgtgccattttcgaaatttgggatacgatggtctcgttgaccagtaatcgtgcccagcggtagtggttgaaaactctcgcaacccacatgttcgcgtagacatgatactggccacgaaaggtgtgctcgtatgtgttgggttcttttatagcgaaggaccagtggatcgggaggtgagtttcccactcgcggagttcatcttcaaataatagggctgagttcactactgctctggaaccgggcttttggtgatgcacatgtgcatcgaacttcgtatatcttatcagtatgtcaactaggtcgacatctggtaagatatccggtggcgcagatggtatgagatcaggagaccaattcagtagatctggggtgacaaccctcttggagaaatacttgacaattgagacaaagtagaattgtaagtgagctcgatggttcaagttggtaagtgatgaccgaaagatggattgtttaagtaacgcggccgcaccattcatatgcactatccaagagttgagctggtttggggtacagctgactatctgcgcgggtcagtttgaattataaaaaagcaattagaaacgaaatgcatacctcgtacagactcagcattacgatcaagtggagtgttctgtcgggattggcctgagtggggttctccactacttctcgtacagccttgatgaccgtaacatgtttctctcgagataatatccgcagttctctgtcattattgacattggacaaggcagcaaggccgaccgagacgatagcatctcgactcgactgatcgagagtaatggccccaacttcaggagatggcttcacagtacctatctgtaaagagccatcttctttggtgacaattcttgtcacaaaacggttaataaagaacctcagcccctgatcctccaatgggatggacagcggggcagcaattctcggagtccgaatcaattggctcctgctcctgcagactaatgcatctgacggagaacagtcgggtcgcgagccgggggtgggtatatcatattctagggcactatcctccaatcttcgacgggcctcggtcttagcttttgcctctgcacttcgtcgagcggccttgtcattctcatcccggaacattgaagacggcacatcccgatagccgccacatggcttgcctgctctcctgcattgggaacacaggggctcaagccggtcacactagaccatgtcagtctacaattgggctggtgttaggccacgccacttgcctttatccgtctttcccgacaactgccgcaacatttactgggacgaccatagaacggcattgtctcttagtggatgcgggtggtcgtattcaattctaaataggcaaagaattcgtgagatcagcccgtgaacatgagtcgatgaccggggggcttggaggcttggactccactatttagtgggttcttggcatcgatcggcctttcctaattgggtatctgtttcatcctagtcaaacatatgtacagtctacaacaaagtatgtacacatcagatcttagttattgaatgtctttgattgtggctttatcattccatatttgcaattatatttgggcactcggctgttgcgcgagacagtctcgagacgatccctagatttagttcgacaaacattcgataaacataagaaaactagtatgaggggttcactagctaaaccaagaaatatacatggtaaaagtattcgaacagggtcagcggtcgaagaagcccttctagggcatctaaacgtagacctattgtacatggtaaacatgtgcctgacccttcacgtggtaatgatgtggctgatgatggtgatgagctttctgcgagctctcaagtggggcagtgggcaaatctgtcgatgtgctggctggaattgtactgcccacaaaagatggggaagtcctactgttggctgcaatagttgatgatgtagctgtttcggtgtccaaaacagcagagactgcaatagttgatgatgatgcaactgtttcgatgtccacgacagcagagacagcagcaaactccgtggtggttgagtatgaaacaatcgaactttgggtggatacgccagaagtcgtagtcgttgcgctaggagccaagctcaatgtagcggacgacgcacttggtgtgggattggccgtagataaaacagctttggaggaggatgcagatacaacatcagactcatccatgtgatagagcaatgatccccagcccaacccgtcgtaatgaccagacccttctccccaggatcccgcaccaccctccgcaccgccgtaatattcaagagagttgttgaggtaaagagtggtccaaggtgcgtccaattgcttcagcacgacatagtggttgtagagaagctcccaggtaggtctgatggctccacgggaggcattactgatctcggtgtagctgactataccgttcgtgtaggggacgaagggaacgtcgtttccaaggttgtatcgcgcaaagtactccgttctagggcgaatattagtaattgctaaggcggaaaccttgggatgattggatggtacttacccacggagaatccggctatcgttataggcaaacaaatcctctccttggttcaaggcctgctgcccgataacacctagaagctgtatgtctaacgctgagtggccctgatcacgaccggattcttggccttggccgagtaaagttccagtactaggttcttcaacgatattggtgatagcattgttgatggcacccgttccatccccgttcttgaagtaattcacagcgaaatcccatactgtttgattgtcggttatgacagccatagccatcgccgaagcgacattgcacaactcccagttggcgaagaaatgaagaatattatgctccgacgactcttcatggttcagccaggtgtagtgcatcgggataaagatgttattggccatttccacgacagatgggaggacatcatccacgaagggctgatagtcaagaaggagttcggctgcgttggcgagttcatacccctgcaggccagctgtgaggtacttgtcgtcgccaccaccgattgcagtgagattggtcgcccatgcatgcaggatattgctagcggcatcggcaaagctcgtgttcccggatatcttccagcgtaagcctagattgaaagctgccgcgacgtcatgccagaggagctgtgcgtttgcggcattgtcttcccaggcactccgatagacaacgctgactgctgaaggagtgtagctggcgtccgacaatgagaggcttgtcaaggtattccaagatgtagtccatggatccagactggcattgatctttttctgggtgcgagagatatcgctttcagagacgaggaggccagggtgcacaaaacttgctacaagggggagaaaagggataacgaaagaaagagaggggaccattgcaaagagaaaggcagcaatgagtacaaatatggcaagaaaaagaatgaaggacaaaactaaagatatgaggaaccagcctagtaatatagagatcgttattctctggttagattaaactacaaataaagcagagatatattcgaggtctatgaaattactccgttcttaatttaaaacagcctgtgtttcagctatgcgctaggaaaattggaattccggacagtttcatgtttctaggtgtttgtagacattagctccggtacctgtcgatcaagtactccgtagttgtcctgacatcggaaatgaggttatattcggctaggaaattcgtgggatctattcgacaagaaacagccaagatattctcatagtacctgaatttattatggcatgcgtactcggtctatgcttccctccttaacgatgtagcacttcaataatgtcttcacgatggtatacggggtaccatatggtagataactccgatgtcttttttggatggtcttcctagatatctctttagacgtctttttacacttgtttgcttctcttcttggtattatagctagaagaatggtcattgactatatcactctacaataggggtaaacgcataaaccctgtgtataaccagagatcttttctacaactcaacggaaattgttccagaacagcttccagtggtatcgtttggggttatcctgtttcttctaagagacatcatccatatgggacccgtgttccccgagagaaaaagcaggtggaagttcatgagttaggcccaagagctgcgtttctgatatgccaggctaagctgctgaggtcggctacatgccatgttacttcgcagagactagctctactaaaagtcaatttcgtatacaacagcacaccgatatctggccgaggtaccgtttccattgcatcaacagctattttcatgaagtatattgccaaaaaaagatattgaattacgaacgtgtccggttatatgacttttcgaggtcttaagacatctccctagagagttgagagtgaaaaaagaggaatagtgaaacgggcgaatgctatagcctacagttacggttgagtggcctaacacttaccagctaccttaattaagagatgcctaaccctatttttcccctcccggcagtggatatcgttgctgctgtattgtatgccattgttttcttattgacagctatacaatggatttgatgtaggcctgggtctgaagcgttccagcttggcggtgtagtgatgatctctttggtcgataccacagaaaagacgctgaacacggggaaaacggtatccaagtaggtatcattatccagctagtagcatctagcttgttcgcagtagcgcttgggcgtttcagtttcaatttcacttccaagcgcttcacagggtctctaggttcgatctgtctctcgtcgacttcaccgaagccacgacaggatatttgggcactcaggggggctgccgtatgtatttgataccctgtatacctgtccatgtgttgccctttccgtctgccggcatccaggaaggtatctgccatacttgggctttcgactcccaaagggtccacacggtagcggtgacccggagattcggatgcgataagaatggcggggtcgatcggctttgggtctgtggtctgtgatctctgcatatgtattctagtggagcatgggtgactgctgtgttcttgcatcagtatggagtatcaatgtgcaagcgtggccgacagtggcttgcgtagctttcgtggcttgaacatttcatattaaatcatggatcgatgttctttgctatagacatagcaggggtaaagtgaagtaatctagacaaggtaaggaggaataaatgcagaaagaatcgatccaagcaaggatggttgcaccaaggccagatgtgtggctggagaacatacaacatgttctagaataaaccttccaaggacaagccctatatgcatgcctttcaagggcattgtcgaataaaaatatcccttctaaatacgcatatgttgctcgtaccttgtacatatttccccctggtatgttttgaaagcggtacctgagctacgtgggtcccccgggtccttccaacaccttggcctcttacgccttacgcaaccacacatctccagactccctctggaccctctattcaattcccctcaccatgatagaaagtctatagagtgaactgcgagatcatcatggagggactattcactctgctcgccctgagcattgtgatggcaattacgtgagctacctgtgttcggaaacctaagattcacttggaagctaatgctcatgattggcagatcctttgtcgtcggctcattacctctggcttttacactgtccccctctcaactccgcttgatatcatcgattggtatgggcgttctggtggggacgtcactgatcgtgattatccccgagggcattgaaactctctacagcgcgaacgctctcactcgcaaacaacacagtacacgggctaccgctattgaatggcagcaccaggccccggtcgtggcagccacgtttggcccgaacggagacagcgcctcaaccctaccgtccgatacccctgtcccgggtcttcttctggaaagagaccaactctccgagtcgcaaacacttcatgtccgtaaggaggattcggatgaaacaacggccaaggacacaatccacggagacgaggagagttcgccacatgcgtgggtcggaatcgcccttgtcagtggtttcattttgatgtacctcgtcgataaattgcccgaattcgcagcgccgacaaaaaacgatcggaccccttaccatatctctttggataaccttggatctgggttgcggcggggttcctccccctcccgcgatggtggactgcttgatgcgaaccacgcgtccagacgtggccacagctttgcgaccacgaccggcctagtgatccacgccgcggcggacggtattgctctaggcgcttccagctcggatgccgggctcagtttcattatattcttggcgataatggtgcataaagctccagcgtctttcggattaacatccatcctgctcaagcaagggctgtcaagtcgcaccgcgagagcgcatttgctggtcttcagtctggcagctcctttcggtgccttggctactttcctctttgtacagatgatgggatcttccggtgccgatgaggcaggcactcactggcgcactggaatgctactgcttttctctgggggtacctttttgtgagtcttcttttctcggtcagaaccatagacctttatattaacccctgcaggtatgttgcgatgcacaccatgcaagaaaacggcccgggctcatccccgcgcgaacttcctatcaacggatatggtgaccgagaccagaatggatcagacaagtccatgagagacttgattgcatctgttttgggcatgatcttgccactattcttgcaaattggacatgctcattgagcaagtgcccgtatgtattccttggggatacgccatagtgcttttacattttcgctcttcaactagattttggagggcttatacccattgcaaggtacatttgggagatgggttattctagctgagataaattgagatacgggaggatatgtttgaatagatttccttgtataactgctgggtgctatatcggtcataattgcatgatatctcacgatcacatctacgtagcgtcactgtgccatatttaaagcatgacaaggtccccgacgtctgacttctccgaagaatactttttatcttcccatgatgtcggtgatgacaagattcgtcagtttcgtcagtctgaatcatcccggcgttcttgacaggttccacggtcccattccgatagccgcatgccaatccacagccttgggtcaatatcctcgtgggtgttaatgggtatcgtgagtgtcgtgaatattcaggttgccttgacagttcacgagattcagccccggagatctatgacttggtcttgggccaaagcacctgcgtgtctacattctcgacgcctcacttttgcctcttttgtcataaatccctaaaaggcaaatctcaggcaaatcagaaggcaaaaagatgcagaggaaacatacgatcagtgtcggacacataagatccatataaatcccatctgctgaactagtgccggcgaggccatgctttgtcagaatcacgacacctccgcttcaactgtcccctttcctcgtcgcctgctttttcattggaagtcgatttcggactttgattgaatgaaaaagaaacgacaaaaaaaagtgatatattcgaaaaaaagaaaaaaaagaaaaagaaaaacggggggcctcgatacattcggaggattattagtctcacctcccttcttccctcggccgttcgccagcctctcctcataaccccgaacatcatactcttgactcccgactcgctcataattgtatgccggccctgaacgctagaaggctcagtgcgttgcatcaataaatacaaatcggacaagtgggaggatcatcctagactgtggcggcctcccccctgttctgcggccatggactcccatcgggcatcattcagcgacatgggagatgggtcgaatgcgcacacaacagatccgttggaccctcatagccaaccgtcccacgaatcagtcaatactttcgccagtactccatccagatcactcagcaccaagagcaccgtcactcctatacccgccaacctacttccttcagcgcccgcatcacccccgacacccgcgcccagccctaccccccatcaacgaccaccaacttggcacacgaccgatgacgaagagactagctttttgttaagccttcgcattcacttcagtactctatccaacggtcgaaaacagaaactcctggagggccttttggacatatgcgacagccagcatctgagctttgtgtcgagttatgttggacctcgattgaggaaagacccatttcaggttttccctaatgagctatgcttaagagtgagccgtttggtcgagttctcttcttatacagtactaatgttgcgtctgcttaggttctctcctttatcgacgatcccaagactctcgcccgagcctcacaagtatcacggcgttggcgagaactattaaacgatgacattacttggaaaaacctatgcgagaaacatgcgtactcggtgcgacgggtactggacgatgaggcggacctcgtcgacccattcaccgcccaccccgtagacccggtttctggctcacgcaccttccacggcctgcagcggcgcttgaccgcatccagtggtcaggccacggagagtgcaccggagctaccccgcacgctttctggagaatggttgcctccgacaagcttctctcgaagacgtcggacccgacctgtctcctaccgttcacagttcaaacaaaaatacatggtcgagtccgcgtggaacaaaggtggtcgatgcacccagcgccatatcactcctgaccaaggtgtagtgacaagtcttcacctcactccgaagtatattgtcgtcgcgttggataatgcgaagatccacgtatatgataccaacggtgacaatcaaaagacccttcaaggtcatgtgatgggagtatgggcaatggttccgtgggatgatattttggtcagtggaggctgcgatcgggaagttcgagtatggaacatggctactgggtaagacagaacatccacggcttgcacgaacaaaaactaacacatgatagcgcggggatccatcttcttcgaggccacacatcaaccgtgcgttgtctaaaaatgtcagatcggaacaccgccatctcaggatccagagacaccaccctccgtatatgggatctggctacagggacatgtcgtaacgtcctcgttggacaccaagccagtgtaaggtgcctggccatccatggtgatctagtcgtgtcaggcagttatgatacgactgcacgtatatggagcatctctcaaggccgctgtctccgcaccctttcaggacatttcagtcagatctacgctattgcctttgacggccggcggatcgcgacaggaagtttggatactagcgtccggatttgggacccgcattctgggcagtgccacgccattttacaaggtcatacgtctttggttggtcagctacagatgcgggacgacaccctagtgacaggtggctcggatggctctgtccgcgtttggtcgttgactaagatggcgccgattcaccgtcttgcggcccacgataacagtgtcaccagtcttcagtttgataagactcgcattgttagtggtggcagcgatggccgtgtcaaggtttggaacctacagactggtcagctattgcgggagctttctactccggccgaggcggtttggagggttgcttttgaagatgaaaaggcagtaatcatggccagccgatctgggcgcactgttatggaggtatgtggcgatgttctgtcttatgagaatatgttttctaatatatatcgcaggtctggtctttctctccaccacccgatgatttcgatgatacagccagtgagagtggtttaatcactacaggcacaagctctgttaatgaccgcgatctggttccaactcgacgtcgaaccctctgctccgtccccgcatcgatcccgttgggcactgatagcgatgcacttatgccagacgcgccctcctaatcccttagcatttgctggtctgaacagatccaaatgcgttttgatatcctgccatctaacgactacgcatatctatttatttgtcatgtttctctccccatcttttgaagcgcggtgtgtttttttcaacagtgggtgttttgccttcagaatgaactactggcgtccctccctatgtgtttctagagcaccaaacggttgcatatttggtgtcacaaatctgtttggttactgtgccttgttctttatccagactgatgaagttgccatattggagttgtgaggcctttcttttacattgttcttatttcatatcggccatttcggagtgttttctggttgagtacatgataccttttggggaacacttggaatgtgatttatataccatctagtccgatgaaatctatcatttacattcctactctttcatctcgcccaagtttgaagctcaaatgtccaaatgtccaactcgtggcctagacctagaatgactaagcgggtctctggctcaccccgttcggggaatgtcccagcatcatcttctagaccttaacgcgagcattggttactgaaatacagaactctgctttagaaaggccattcgtacatcctttaagatgtgtatgtgcttcgctttgactaggcagccgagttgatctagttaccaccgatgacatacggccgtcctggacctttgtgaaacccagatctgagtccgacctgcctgtaactcgcagtcccctttgcgctttcgctcaaagtacccgcaagtcttggaggttccttagacgactgccggcgggtaaacaatggtctatgggggcaagccaagtaccggatgttacctgtgtcgcaagcggaagataaaggtatgttccgagcttcaatatttgtttttggatttaccccgccaatgaatctgtattgtgtctgtacttatctttcttctttgcatgcattgaaaggtcaaatgctaaattcctcccttcaagtgcgatgaagcacacccggagtgccggaactgcatcatctatggccggccatgtcctgggtaccggccggatgctgtctttcgcaacgagaccaggaaagtcgagcggctggtgaagagcaatgccggtgtaaattcccatagcaattccgacagccagaacggctccccaacggcggactcatctatgtcagctgtctcgcaccgccgacgcgcaaactcacatgccaaacaccatggcaaggctaccctgacgctatactcgcccgctgactccagctgggagcaacgagcactctgctacttcttcgaccagtacaccatcaaagctgatgccgatgatggcggacacctcgaatatctacccccgctgtacgcccgcgagctcggtcgccagagcagcgaatcgccgtctccttgtttgcggtgggcggttgatgccacggcgctgatgactctcgctaatgcgaagaatgccccacctctcatgaataaggcgcgggagggctatgggcgggctttgcggggcttgcaggaggcgttggcgtcgccggctaatgcggttaaggatgagacgtttgcttcggttgttttgctttcgctgtatgaggatatctcgggcgagcggaatgggctactcagctcgcatacggccgggtttgagttcttgatgaagctccgtggaaacacgctggttgatcatcagcgtggtcgagatatgcttacatttgcttatgcccacacggtaggtttgactctgacatcgggaccgtataaatatcggtccgagactgacgtttgtatagtatgttgaaatacttgcactgggagacaagccccggttcgacatcaaatgggacctcggcatgctcaacaccaatgacccagtcgagcggctcatgttcaccgtatcaaagctctgtcagttattcctatacataagatctccaccaaacctcccagaccaagcagcaatcgaatcatggatcagagccggcctcgagtacgacatcgaaatttcccaatggacacagaccctaccagaccgctggctcccactagtcgtctactcagcacagggcgagctcctactaacatacaaccgcctctccaacgtcgtgatctggaactactaccgcgcagtgcgcgtgatggtccagcatcttctcctcggcctaaacactacacttatctccatcaaggcagcgaacaaacaattctccgattccccgaattccagttccggaccagagtccgaacccgttctcgacgagtcagctctaaaagccgtcatccgcgaaatgaccacagacgtctgtcgcagcatccccttcgcgctggctgacgtcgactccctcggccgcccgaataaatcagatagcgcgtggaaaatgcgcgccgcgcagggctacggcttgctctggcccctctggtatattctctcctctggtttgccgaccccggcacagggggagcagatccgcactgtgctgtcgcgtgtcgggtctacgcagggcattaaattggcgttggttcttgctcgtgaggcggagcgcatgcgtggagagcaggaggacgcgcagggtgaaattcttggttgggatttaccccgtggtgcgtacgatctcgataactaaacttgatgcgtgtgatttgagtgccgattgcgcgggatctgagagctatgctgtaccactatgacttgaaatgaaaaaaggctcttgggagaatttcagtcactgaatgctctgctaaacgcataacggcaccagaccagcaccagatcgtctgaatacggctgggtagacttggagccagtcgcatgttatacatggaaaagtcgttttacacattttagaccttttttcaccgcagatattttctatattctgcggctgttgattttcatatttctctataacactcgtacaaaaaaaaaacataaagatcctcccaaatctcttctggagaccaaatggatcagtttattcaacctcgtattattgtctagtactagtggcatctcagaatcaatataaacattagaactacgagtgtattcagtctacagaaaacacgttctcctcttccgactcttcgtcacccgactgcggcaaaaaccctttcctaagcagtgctgccttcatccgactgtaatcctccgtggcgcgagcgatgatggctgcaaggtcgttgtaggtatcaatggcatggcctttatccttcatacggtacacctcggggtcttcaagaggcgagttgtaccaggtcgtgttgaatgggagtcccccgttcttgagcttaggaggtgcgtccttagtggcgcccccactgggctttgcgggtccaggttctggcttgcgacgtttaggcgcgtccttggtggtcccccggctgacccttatgggaccaacatttgactttcggcgcttagcgggttgctcttcgtctatatcttgagtagcgggtgtcccgtttgagacggtgcttccgcgcacgcgtgaacttccaatggtaggttgatgtgtcgggggatgtacaatagacacttctacagctgcatgaggagattgttgtggttcacgctcagagggtacgtattcgtcatcaattttttcggggttcgggtgggccacaggtgcagggagatttcgactagtcgacttcgagagctccagggcgatagctatatcctttgcgctgtagtatgtgcaaagcaatggattcgagggctcgcgttcagccacggctgcgataacccacgcgggcacattcggagatacatcaggacctgttcgcacatcagtattatcgtacttcgtccacagtatagagtacaacgtacgaaatgaatattggtagggtcttcgaaaaaatacacaactagcacatgcccacatccattgtgcgttggtgttcgcgaaaactatccgacaatgcatgaattgacccttgccatgggcgcagcgcgtacatttgtgatccgctggggcttcgagaccacacaactgcccctgcgctgcacgccgatacaaagtagatatcaacggcctgggctggctatttttccaatctagttcggtccgctcggggtgcaaatcgcggattttccgttcggctgccgttagaaaatttcgtagcataggcaatccggcagtgtctaggcccgggtagtgagcttaacaaccctattagcgaatgcgcgtgcttgcagggccgaaaaagaatggatatagtgctcacggtcctcgacttgcgctttgatggtagcgtcgagctcggcggccgtacgggctcgaaccgacgggccagggtcttccttctgagcagcgggcttacgcgtcatcgtcgcgacatcagtcccatattcgccgttcgtctggtatggataatcagtcgcatcgtcgtcactactgtcagattcggaggcttgtaggggattggaagagattggagaactgtcggagctttttattattgcctgagcgagattgttggtaagcatgctgtcttgaagtgcgattgaccctcgagagttgcgcttgaagcgaatctcgcgacccatagctatcgtctggactcgtagcagacgtgttgaaagggcttttgtttcctttttggtgaacagctcggaattgaaatcgtccagcacttctcagctctcacagttcaggaacttggaaggaacgtaaaaagagaccatatgatccccttctaatcccaaaaggtttagtttgtggttgagtatcaggtaactatgttgtacgtcattgaggctgaatgcgggtagacacctgataaacaaggtatctgtctcaactagataactataaccgcattgatccaggtagttaattcaagggctttatatcctcttactctcttgttttccgggatctccttgtagttgtagtcctcggggataagtataagaggcattcctctgtatcagctgtaagctcagataagcgaagctagggatctccggctaagtcggcttgttgtataccactgtagcaccggacttggccggatatcattgacgtcatttatataggaccatggcgaatgcccttgaatatcagttgatttgcagaatatgcagaaaatcaatcgaggtcaataaaagacagtaaatcaacaacagtgcacctggaggtgtatggagtagacgaagataccaaaaaaggaaaaaaactcgggaggtgcggagataagcacaggcccactgacgacatactccgtagtttcttccaaggtacaaagattggaagcattcggactttgcttcttacacctctcccctcttctttacagtatacaccatgaccacacaagaacgtaggcttccctttgggaagatcgagcccaattcgctcaagtactttgccagctgtgcactgggcggagtcatcggtatgtccaagctccccatcccaccaaggcacgcactaacaatattactctagcttgtggtaggtgacagctctccaatttgcaactaactcactcaattgacacccaattccatataggacctacccacacagctgtcacacctctcgacctcgtaaaatgccgtcgccaggttgatcccaagatctacacctccaacatccaagcatggaagactatcttctccaaagaaggcctccacggcgtcttcttcggttggtccccgaccttcctgggctactccatgcagggtgctggaaagtacggtctgtacgagtacttcaagtacatctacggaaaccagatgttcccgcatgccaaccccactttggtcttcctcggtgccagtgccactgctgaattctttgctgatatggccctgtgccctatggaagctatcaaggtccgcatgcagactacgctgccacctttcgcctccagtatgcgtgagggctggggtaagatcgtcaccaaggagggttatgctggtttgtacaagggattgtaccctctgtgggccagacagatcccttataccatgaccaagtttgccaccttcgaggagactgtcaagctcatctaccgcaccatgggtaagcccaaggaagagtacagtcaattacaacagactggtgtcagcttcttgggtggttacattgctggaatcttctgtgctcttgttagccatccagcagatgtcatggtcagcaaattgaatgctgatcgtaaaggtgagttttttctttttcttttttttcagccgtcttgatgtatgctaactgcccgtgtagccggtgaaggtgcgatgacagctgtgtcccggatctacgggaaaatcggcttccccgggctatggaacggtttgcctgttcgtattgtgatgctgggaactttgaccggtttccaatggctcatgtaagtgtttgctccgttctaatttgcgtgcacagcgatgctaacatccttcagctacgactctttcaaggtgttccttggacttcccaccactggaggtcactagatagtcatggtccttaggtagtcatggttcttggaggttcttttttctagagaaatagtgtatatagcaaggagttaaatggataaacattgataaaaccatattgtgtagaccgccttcgatatcggggcagaataatgttggaggtcatcgcattgttgccgacgacgtttggcactcctcagtcgggtcaccatttcagtcaatcgtactcactctcgtcaccaacgattaatcaacgactgatataggcatactatatcccgctgtctatcatctgagcatttgcctcccttgtatattccacatcacccccttcacatcgtgcttcgagctctgaccaagaagctcaaactaccgtgtccagctccacacacaaataccgacctcctcgctcttcaccaaaatggaagcctcccgccaaccctcctccatcccgccagccaatccccccagcgtggaaatcgcctacaagcgcaagtgcatagcgctgaagaagcgcctcgccgaagtcgaagccgagaatgaaatcatgcgcacccgcaaccgccgcggctcccaatacatccagaaaatgcgcttggaaacctgcatgctcctcgaacgtctaacaaaggtcaccggcatggccgacgaggcaaagacaggcaccgcaaacccagaactgcgtgcccgcgccgcagccatgatgaatcctgcacatggggccggtgtgcttctggaagacgatacggagggtagctccgatgagcagccgcgcacagtacgtatctgcataatccacaaatcttaagaaacctatacagacccactgcccggcctatactctcctccctccgtctgtctgcctgatccaagctaactgtgttctttctttatattggatagcccgaggaacgcccgctacgcgttaagcgctcccgcaagtccaacgccaccggcatcgatggcctggacgatgatctccccgctcacgatggacatcccgaatctgtagatcccgctgctgctgcccttccccgtcttgcgccggctccgacacaggagtctcttactcattccttccgtgtgcagacgggcagtggtggctctgcggaacagactcctgttgctgctgaggctggtcctgaggctgtgactacgccgatggatgtggatagggaggaggttaaggagcctaaggttgagcaggcttagtgggtggcttgggtcttgtcgtgtattttctttaattcctttctgggctttgcatagcccggactgagactccgtttttgttttcatttgagggttttatgcatcgggttctgatgcggtgccggtttactttgctaggttttttctttttttttcgttcctttggtgggccttaattgggcctttccactactatacggtctcctggtgtctatgtctgatatgaaattcgtctgagaaatcatgctgaaagcatggatgaagtaattggttcctccttgggcttttgatgtcgctcatttagactaccaagtctgttatggtcactgctagtcaagtcagtgcatagaagcagacagagtaagggaagtggaagagagagcaggctagtggcaatcaaaaggtggatttctgtagttttagggcacggctcaacatcattgtgatattcgggcatcatagcgctgataggacgtacgaactacgaacacttagttccatttccaaagttggaaaacgtctctgaacttatttcgcaaaggcccatagcgattcgattcgattgattgacaccatctgtacagtaatcacaacgccgttttccccgtcacagaaccaacgtcaactccaataccagtaagaaagacagcacactattggaaacaagaatgggatgattatctgggtatgaatgtcctctgtcatgtacaggtgaagacataacgagtttggaaaaatgatacagattgcaagggttgatggtcaggaagattagacgcgggtgtgttttatgttaggtgcttccccctggcaggcggtgttcctggctcggctgtcgatgtagagtcgtattggattgtatgaaaaggcacataagcatataaaagcctaatactcgtagcacaattgattggtcgagacaagcgtcgactagtctactccagcgtagagatcgacgacaatgttgattccagccacgagaatctctgcggcgatcaagacaatgactgatattcgttagctaggttgttgttagaaatcacaactctgggagacttaccaatccattcgagatattcgccatggcgatgtgtcaattgatcctttaggactgcaagcagatccgcaatgacatccagacgttccgtcagcagactaacacgctgatccatctccaggtagcttcggactgcctggtagacaggttccaactgcggctctgcccagaagagctcagggctatcgaggacagacccttgcaagtgaatattgatgcggagaatgaagagctctccaatctgcatattgatttgccgacgggtgagattgacgctaccggtttgcgcaatctgggcaggtagcggtgcagtgtcggtaattgtttctgacacaagatcttcgaaaagcgaggtcttgaccgattgggccagagcatgagagatcgccagcttgaccatgttgttgcgcggatcgcgaagagagatgaagtcgttgtagatcctagcctgatactcgcgcgcatagtagaaattgaagttctcaatctgcgtgtcatcgggactcaatatggaggttgcaaatttggagatatcggataagaatcttgattcttgcgcgggcgtcattccccatattacaaccgttccgtagtcaaagaggaatacctcgggtgtgtggattgtggtgtcaataccaggagtgtctttggcgactacctggtcggcatcattcgagtgaccgcgctcgtcgtgcagatcaatcaagtcctctcttctggtcttcttattgtcttcaacctccaccgcactatccgagtatcttctttcactgggtcgtctctcatgatgtccattgccatttggatctaataaccgtgcgttctgcttttcctcgtactcataatcaaaaggagagtacacgcattcatcatacagcttgggattggctccgcgagtcttgctccgcgatttgaggaacttgataacgccctcaagtcgatatgaattggccgtgcagtaagctgtcactcgaggtatgcgatcgcggtcggctttacccaatcgtgcagcatggcttcgtgcggcagggtccttgatgcgagttatttgtgaatagacatcccgagggaaatctccttcagacccttcttccccctcttccgtgacagggtccggcaacagttttagtttttgtgcttttttggttgtccgctgcggtccaattttagatgccgcatgtggtgtgttcgatacgttagagggagccccatgactattgcgacgacgaagcttgctgtttaatgccgagagcatgggctggctgccaggacggggctgggcgttgacattctgcacaggaggtgagcctgtttgcaacggccgaaatgttggatcggaggtagaggcagtgccataagtgctgatttgtgtgagcggattgaaggataccgaccgcgatgtccggtttgcccgtggtgacgtatttgaggccgagttctgcggcagcagaggagaattctcagcgtcagacgccatggcaaaagagataaaaggtgtagagttatacgccgtgtgccattgacgaatggaattggagctagagaagcaaaaagtgatgaggaaaaagttagaggaagctggcaacgttgagaagctaaagatgtccaccttaataatctgagaatctgcccgagtccggtccttggcgcttttgtatcatttcaatttcgacgcttctctgtatatttcgaggtttcgacagttctatctttatatcttttggaaagactttattgccagacattattagacatgattgactgaattctatatacataaccccccaaagttgaattgcagaccaggtcttactcccaacaccatgcaaccctagtaacacttgcacaaaaatccttttcaatgatcgatcacaaaatggctgcagtagacgcggggttggttgcatgtccaatcgacaccgactttcgattcgcgccaatcgggcatcgaaaccccccgaaaggaacatcagtcgatgcaagtgagcatgtcccccgttggcattgccaggtcgtagatgtaacttccagctatgtttgaagatatgtgacactgaacaaaactcgcttttgatggccgtagaccattttcaatttcaccgacgaacaaatccagaagggccgcctgccttctgtcggagcccattgccctgagctatggtacgggtcttctgaagcatgctactcttgaggttccgtccggccttggagatcttaggggccagcgcgggctttgtggacttctttgacgatggcgcatccagcacccggatagagacatctcccaggttgatatccttgggaatcttgtcctgcttgtctaggaatcgcaacttatttgacttttgaggcatggcaaattgatcttcagccgggggtgtaggagggcgaatggcgaactcagcattcaagatgtcatcgggaagcaaagcaggaagcgcggctcgtcgtgcatcttgggtagttgtgccttggagagtagcggtgctttcggaacgcatgtcatcggttggagactccttgggcttgacaatcgatttagcttgcaacttacgacgctcatcgagtttccgtcgcttctctctcttcagttgctcttctctgtgaaaaatcattagtcaacatcaactttaccaaatgaaaatcacacgtacaattgcttggaagcttcttgcttcttagcctgctccttcattttcaatagctgggcagagttatcaatggtctctggcgcatcatcgtcactatcgtcttcgtcgtcgtcaccctgtgtaggtgtttccgaaatctcttctggctgtgtttcgagtgtttcaggttcctcgctaccaaatcgaatcttcttgcccgcaggtgctttatccccaattacgatagatttctctgggatatgtttcgtagcatctgcggttccagtagccttcggatcgcttcttcttctccgcttggtctgctggtcttcggtcttgctagcacttgctgactgcgccttgcgctttccactcgcaacttcggtcgcaacatttgcgcgtcgggtagctgtcgccatcttggaattggtggcagaggtgccggcggattggggctcttcttcttcgggctgtcgcgtaaatagacccttggcagcagtgaccaagtgagcaaacatagagtaagaaggaaattgagaaataaagcaagaaacccaaatgggggatacggctcctcgtgttggataagaagtgaagcaaaaataaaaaatctctcggcgatcaagatttcccgagagcggagacgataagcaactctttgctatcacttctcttcgtctacttcaccttcacttggtgggcaagtagagtatcttcttttaaattaattaaatcctctttgtctagtcttgaatatcaagttcaagcttctctaaacatcaattggtgctaaaaatctgcgcaaacagcggatttgctctacaaagtcaaaaatatatatatcggtgtcggtgtccaacaagcactgccaaacccaacgtatattatcgcatgaaaacacaatttacctgacatttattgcttggattttgccagatagaacccagtgagcacgaaccaagcaatttgagctatttgttgcaagtcatctacagagtcatacttttctctgctgtctaccccaaaactcaagaaagaaaatatctaaaaatgacttctaaaatattactatcgagccaacggatcatgtcgtttccaactacataggcggacgattcttgacacgtaacatatatgcaatgaagcataacctctatatactgattacggcaaggctgccgggataaagcttatgtcaaaagtaatcctttacccccgctcaagggaccaaggcgtgttgaaatggatatggcatgaaccttgaatattgtacaaccagatgcaaatgataccaccctgtgtgtagactccatcgaaagataagaacgctgtatatagccccaagttgaacgcctagaccgtaaaaaactcctggaaatcattactcattgataccgtagaggttcttataaaactcctcgtgcttgcgaaaacactcggcgcgttctaaagcctcctcacgagaccggataaagtcgtcctccccaatggggctgagctcctcccacatctgattatattcgtcttgatcactgccagtcatggcccacatgctctcgcgctgacgcttgttgcgctcccggtcttcctcgatgcgctgctcgatctgcttcttgtcaaggcgcagttggggcttctcagacttcgacttgctgcctccctcggggccttcctcatgttcaagatccaggtgggagggatgggaatcgcggtctttcagagccgcgtcgatctcggccacggtttcggcgctgaggacttccttcgctcggagaccgttcaagacgtgacggacgtgcttgacattggctgcgccagtgccatcgggaggaacgaccgagtcgaccacgcgcaaaatgtctcgttgcatcatgcgcacgtatgggaggtagttttccttgatggccatttcgcagaggtgttcaataaagtacatgatgttcgcacgattgttcatgttgttctgccacatgtaaagtcagaatagatcaacacacaatgaaatcggagctcttacccgctcaagctgctccaggatgcatgagtgaagatcctcatcgaggtcacggtacttcagcgcataatgcgcagccttctgcgatgatgtcacagcagcactgaggtgctgcagctgtgtagtgaagcgcatgcgcacctcaaaaggatcgatcatcattttatcttccggtgttatggcttcctcaagggtaggaagatcagtagccgtaccggtagagatgagagcggtcagttttaaaaagccgacagaaatatgtggggtcagaaaggcggtggggcgaagccgcaattttatttcgataacctgctacgtactccatacataacgtagcgacttctctggcatcatttgaagtgaatattcgtgaacattgtaacaaaatcaagatacaccgagcaatatggtagcaaatatcatcaaagggaatcccgcctcagcgaactaccaagactagatgtatcattcccatcaagcaaaccaacctcttcagcctcattacgattttcgaaatcctggtattcttcgtctcgaagggcttcttctcggcggatttccacgccattcagcactgaccaaacatctttcttggtcagtagtccttgtagaatacccttgttggcaaataacacataacgcaagccaaggcgctggaacattttcaaaacaatcaaaaaggtgatgttactgttcaatgtcatcggtgtctgatccatccaaggtcgtagatcaagggtatcactagggtctgcaaaaggttgatgcgaaaagaagacctgtgtctcgtcggagaggttgcgggctgtaccagaggtcgagtatttcagcgcaaaagaaatctcattgcgggtgatgtagcctagaaggacgggactcgacgtgtctgatactatggggaatccgcgatatgtagtgttagctaggaggttgcggatcgaggcaatagtatgaccggtggcagtaatgatgctgatatcgtccacggttgtcatgacccggttggcagatacgtctggcggagtggtgtcatcacgatgatcgaggaaaggatactcgtttagtcgaatccatgactcgtagatacctcgcttcccgaagatgtcaccacaccacttggacagcatcacagcaatcatgatcgggatgacgtaggtcagcgcgccggtcaattcgaacatgataacgacaattgacaaagtcattcgagtagcaccaccaagagcagcagcagccccgataattgcgtataagccaggtgtgacacatggaatgtctggctcgcacctgctaaacaggaatgcttgcggataagattcttgccacaagcgaactataatgcccagagcacgcccgtaaagagcaccgatagcgaccgaaggaaggatgatacccgcaggaatctcaagtccaaatgtcaaggaagccaagaaaaaggcaagtaaagcagcaacgaccaggtagattgccacgccgattgaggcagatcccgtggcgcagagaccaaatcgatcatatgtcacactgttgcactcggcgaacagcgactggacaagctccgagttctgagcccgcatgaagtgatttggatagttgatcaaagctgtaatgagagccacgacaaccacttcgatgattggtcgagaggaagtccgagctcgcctccatttggtgactttagtattcaggcggatgaggaatgcaccgtagaggccgccaatgatgccaagaataatgaacgggatgatctcaaagcggtgccagcctcgagtgtaggtgacttgatacagcacaattttacctgtccggaatgggttcaaggcttgcaaagtgacagctgcgaccatggcacagacaaagctttgccacattgtcttgtcgggaaaataatatgaaagttgctagaataatcagcaaagtatataggacaagattgaaaatggctcatacctccaaactaaaaagaacacctccgatgggtgccccgaatgcgactgatatacctgctgcagcagccgcagaaagaacctctcgtttgcgtgctgtgaaatgagtaaatgcgcagagggaaatatagaattaatcacgtaccttcattgcctttcaggctttcaaaaggtttcatcaggatattcgcgcaacagcatgcaacatgcacaagtgggccctctttacctagccatagaccggaagccacagaaagacactgatcgttgtcagcaaaaatgccttataacaagaagaagcttgactcaccaggcccagtgatttaatggcaagtgtccatggtcccatgaaatgtcggatgacagttccaccgaggatcgtttttatctcggggattccactgtgtctagcataaacggcataatttcgcaccaagaagcaagcacatgcagcaaagaaaacctagatatgtactgtcaatagagccctaaaggtaagagacagagacatcattaccgaaaatgaaacataaaagacatatccaaccgtatatgcccctccactggactttgcgcctaatgcatttccccaaggtgtccagtctaaacacttagattgatctataccaaatccagattcagtagtgagacttgtagagatttgacgccatcggcttaccatcgagaccccagcagcaaaagctcttgttgagataaaacttgccacctccacttccatttttgcaatatccggacttcaggtcacctagccaatccgttgcaatatcgatagaagcagcgattattcctacagcaatgcctgtcgcaatcaacactaaccagacattgcttgcgtcaagcagtcgacgagcatggcccaatagaccctgtccactcgagtaaagaagccgtttcctttgccgctccttggtatactcgtagatccaatcgatagcagtgaagtcgtcgtagcccacacgtcgtcctgggccttccacgtaccagtccaatggcgcgccatcttttgaggcttcagcaccactattgagccctatcggcgcgtaaggatcgagtggcgatgcatcgccgttctgaccaccttgcggcgccggagagccaaagccagtatccgatccgccggagggaggggagagaaggttagatagactgaaccgtgatcgttgtttttgttttcgcttgaaggagatcctaaataaataacctgatcagcgccgtagcgaaaggtggaggctccaaggcatacggctcatgtaacctctcggcttcccgattcacttcttgaggctgaaggatgtcttgatcagatcctagttgcgtcccagattggccctcgccacctgagccctgaccactcattggaattagtataacataaatgaaccgcgatatcgcgatatcagcatctcctcttaaaaacgaccttgtttcaaggacagctttgttggacgcgcaagtgtggcgcaagctccgcgatcaaaagcggtggggctcaggtctaggcggggctgcgccacaggcggcagaaagaaaaaaaagttggagcgaaagccgatgaagcgggatttcctcttttattacaaacttcacagtttctctcacgaccggattaaacatggatcggaggccggtctatgaggggactcttactgagtctgaacttctcgagcagcttccgagtggaatctcgactttcattcggactgcatcggggacgcaacacctccacgctcttgcgcttggcgcattaaacaacgaatttacagagagcattttcagactatacgaaccgattttcgtcgatcttgcagctagatggcttcaatcggatttacatgccgactacattcatgtattagcggcattcgcgcagattttaccatttgcgccgcacctgcgctcgcttgccagtcaatatgcctcatcacagactggacctttggtggctttggccgtgtcgaaggaattaacactgctacaattggatcaagttagcattagacttctactcctcgccctcttccgacttctttcatttgatcttgaaaccttctctcccatcatttcaccgcttcaactgcagtccctcttccaatcccaagatcgagtaacacgataccttgctgtacgatgctttgccttatatatgcacgcagccgatgcggcaaccgaaaagatggtccgcgtcaataccgggactgagcctatagaaggagagtgggaaggcactctgatcgattaccgtgtgctaggattgtgggaagaacgccgatgggagactcttgggggaattattcgggccgagaggacttccaggacggaaaacaacaccctggcgttgatcgagaggacacgggactctttcacaaccaagaccgcagaaatctgcggtgttttgattcccaggttgaaagatacacccgcggctccttcgtctgtcgtcaagactactaccacagttgaaaatctgcgccgaattgcagggtcattactcggttacaaacccatcctgctggtcggtttgcccaactccgggaagacctctttgattaatgatattgctgccacgatgggccagattgaaactatggtcacacttcacttgaacgaacagacagatgcgaagagtctgcttggaatgtatgccacttcatctgcctccggatcattttcttggcagcctggtgtattgaccaaggctgcacgcgaaggtcgctgggtgttgattgaagaccttgatcgtgctccatctgaagtaatgggcctcattctcccgatcattgagaggggcgagctcactatcccgagcaggagggagcgaatcaagtgtgccgagggcttcaaaatcatcgcaaccatgaagtcatcgtacaacattgccggcgaggagatcgcaccgagcaattcaatgctcggaagcagactctgggagagagtgcaagtcaagtctcttcccgtggatgagatgcgtgatgtcatcctgcaaaagttctctttgcttgagtctcgtgtgccaactctcatgaacgtctacggacgagtatgctctgcattccatggaagtcttgcgatcaagggctctcaaggccgtaccccgggcttccgcgatttgatcaagttgtgcaaccgtctgcacaatcgcctacaccgcataggtgcgaagactggctatgagcccacgtcagaaggtaccgaggatgaaatattcctcgacattgttgacgtgttcctccggtatctgcccgagaagtcaatgcaaagcactctcgccgccgttgtggccgaagcgcttcaaatttctccccagcgagcgcaatattgtctcaatgaacgcaccccctcttatatcgacaagaacaacagccttgttcttggcagagaaacctgtaacaagatcaaagtaccaagtggatctgcattgaagcttgccgcagcagcttcacgatttgcccccacccgagcggcattaaccctcatggaacaggtagctgcctcaatccagatggcagagcctgttttacttgttggagaaactggtatcggaaagaccacggtcatccagcatcttgcatctttgatgcgtcagaaactcacagtagtaaatttgtcacaacagagtgaaagcactgatctgctgggtggtttcaaacccgtcaacatccgtacaatggcagttccaatgctcgatgaattcactcagctctttgaactgactttctcggccaaaaagaaccagaagttcttgtcgtccatatcgaagagtgccgcgtcttccaattgggtacgattggtgaccttgtggcacgaagccgttcgtcttgcaaatggagtgttcaatccctcgaatgccacaggggagaatggcgatgaacagccagccaaaaaacggaagctggattctcccaaataccagcacttgcggcaaagatgggagagcttcgcaacacagctcggagatttcgaggctcaggtctcacaaggtgatgccaaatttgcctttgcctttgtccaaggtaagattgtgagagccctacgaaacggcgaatgggtcctcctggatgaagtgaacttggcttcccctgatacccttgagaatattgccagtcttctgcaccacggaagtgagggaacgccatctgttctcctctccgaggctggcgatgttgagagagtcttcggccacccggaattccgtatcttcggtgctatgaaccctgcaacagatgctggaaagagagaccttccccccggtttgcgttctcggttcaccgaattctacgtacactcacccgatagcgacttggatgatttattggctttgatccagaaataccttggtgatttgacaatcagtgaccagcgtgccgtgccagacctcgcacagctttacatggtgaccaagaagctcagcaacgagaacaagcttactgatggagctggacagcgacctcatttcagtatccgtactcttgtgcgggccttgatctatgtcatcgaccacgcacatgtctacgggctacgcagggcaatgtttgagggttttagtatgagtttcttgaccgtgctgagcttggtctccgaacgggctttgatacctctacttgagcttcatatctttgggaacgcgaagaacgccaagtctcttctcggacagaccccccgcccaccaactgatggcaatgattatgtgcaattcaaacattactggatgcgccgcggtcctatgctcccggaggagcagccacactacattatcaccccattcattgagaagaatctgaagaacttagtccgggctagttcaactcggcgattccccgttctgctccagggtccgacatcagccggaaagacgagtatgatcgagtatctggcaaaggtgtctggaaacaaatttgtacgaattaacaatcacgagcatacagatctgcaagagtacctagggtcttacatctcgtcagacgatggaagcctgcgttatcaagagggtgtgttggtggaggcgctgcggaacggttattggattgtgctggatgagctgaatctagcgccttctgatgttcttgaagcccttaaccgactcctcgatgataatcgtgagcttttcattcccgaaactcaagaagttgtccacccgcatccgaacttcatgctgtttgccacgcaaaatcccgctggtctgtacggtggccgaaaggtcctatcccgtgccttcaggaaccgtttcctcgagctgcacttcgatgacattccagaaagcgagctggaatttattctgaaagaacgttctcagatcgctccctccttctgcacgcggattgttgaagtttaccggaaattgtccttgctgcgtcagtctaatcgactctttgagcaaaagaacagttttgccactctgcgtgatcttttccgatgggctcttcgtgatgccgatgatcgcgagcagctagcagtcaacggttatatgcttctcggcgagcgtgttcgaaatccccaagagaaagccgccgtcaaaaccgtgatcgaggaagtgatgaaggtaaaactggacgaggatactttgtatagctctgcagagctggaaaagaatgctcctgagatgagcgagcttccaattggtattgtgtggactaaagccatgagacgtctattcattctcgtttcgaaggccctcaagaacaacgaaccagtccttcttgtcggagaaaccggttgcggtaagacccagctatgccaggccgtcgctgaagctttccgacgcgagttgttcattgtcaacgctcatgtcaatttggagaccggcgacttgattggtgctcaacggcctatccgaaaccgggctgctatcgagaaacagcttgtagatgaccttcaaattctccttcacgggcagctgagcggcgcgtctttcgatgacttgaagcaggaattcacagcattgaccgcggagcagcgccaagccaaggatcagcttctcttgaagaagattgagaagaacgctattcgctgcaatgccctgtttgaatggtccgacggaagcctgattaccgccatgaagaccggtcaattcttccttcttgacgagatttctctcgcggatgactccgttcttgaaagactcaacagtgttctggaacctgctaggtcgattcttctcgctgagaagggccccgttgattcaatggttgtggcagatggtggattccaattcttatccactatgaaccccggaggtgattacggaaaacgtgagctttcggctgctcttcgcaaccgcatgacagaaatctgggcacctcagctgtctgaagatgaggacatcttgccgatcctctcacagagattggatctgaaggatgagagcgtcgcaacggctatgctgcgattcgccaagtggtttaaagtaaccttccagaactcctctgccacatcgctctcgattcgtgatcttcttgcctgggttgactttgtcaatacttgtcaaagagcagacaccccatttgctatcgtacaaggtgctgcgatggtcttcgtcgacaccttgggtgcgaaccctgccgcaatgcttgccatttccctcaacaatcttgagggcaaccgcaagtcatgtctcgacaagctgagcgaactgttcaatgtcgatgcttccaagatctactgggaatcgaccaccgtctccgcggaacccggcgttctgcgcgtcggaccatttgctctacctacggctggtacagcagaccccgatcctcaattcacaatggatgccccaactacaatcgccaactctgtgagaattgctcggggtttgcagtcatcgaagcctatccttatggaaggaagcccaggtgtgggtaagactacacttgtgacggctctggccagagctcttggcaaacctctcactcgaatcaacctctcggaacagacagatcttacagacctattcggttcagacgttccagtggaaggaggagatgtcgggcaattcacttggcgtgacgctccattcctacgagccatgcagcgtggtgactgggttctgctcgatgaaatgaacctggcctcgcaatctgtccttgaaggtctcaactcttgtctcgatcatcgccagcaggtttatatcgctgagctggaccagacattcaagagacaccccgatttcgttctctttgccgctcaaaaccctcaccatcagggtggtggcagaaagggtctccctgcatcttttgtcaaccgatttacagtggtctatgcagacagcttcactgacgatgacttgaaaacgatttgttccagacttttccctggcagtccctctgtgcagaccgagagattggttgatttcatttccctcttgaaccaagcgatcacacgagatcgtcggctgggaaccatcggtgggccatgggaagtcaatctgcgtgatatccagcgatggcttcaacttgccgatcgaggaaacctacagatccagacaaagcacttccttaatgtcgttatcagccagcgattcagaagcgaagaggatcgtaacgtggtctctcagatttatgaccgtgttttcacagactctgatactggctcggagagctacttccacaacctcacacctgaatacttgcaagtcggtctgggcgttttgacccgtgaccctctgctgcagcgcttggccgaaccaaacatgaggattctaccaaatgatcttcatattgccgagtcgctcattttgtgtatcgataactcctggccgagcatcttagttggtcctgctgggtgtggcaagactactctcatcagaaagctggcagcggtcaacggtgcaaaccttgtcgagctagctttgagttctgatactgatactatggatctaattggtggattcgaacaaatcgatcatcgcagagaggtttcaggctttgtccatgatattgagatgttcttgcgaaaccagctcatccaatgctttgcttcaggggatgtatctgatgttgtgatttctgcactccaaatttgcgagcatttccagtctgcagatatctcgctggaaaatgtcatcccctcgctttccagcctttgccagtcttcttccgaccctgtctaccaacaattcctcgagagagcccaaaccttgttaaatgcaatccaacaatccgataaaatgaaggttggatttgaatggacagaaggtgtcctcactcaggctgttcaacatggaaattgggttattcttgacaatgctaacctgtgcaacccatccgtcctcgatcgactgaattcgttgacggaaccgaatggcacactcattctcaatgagcaacggacagacgatggatctgccaaggttatcacgccccatgtcaactttagaatcttcttgacaatggacccccgcaatggcgagctgtctcgtgccatgaggaaccgttgtaccgaaatctgtttcttgccaagtgagatgcaagacatccaacctaccataggcccatcttacacctgtgaatcgttcctctatcgacttcgccatatttggaacttggatacctccttgccatcgtctgcctttgaagacgctctcgaggtgtgcttggatcatctttcaccagcggatctggcctaccttcaacagtcaccaagcaaccgtgtggctatcaactccgagcacaacggagaagacaagccatccaatgttctgcagcgctatacctctctgttccatgacaacaaccaatggaagccgcttgacatcgccagcggcgagattgtgcttggtggggcccaccttggtatccgaggaatgttgcagcctcttcacccgcttacaaatgagcctctgatagctattgcaggaaccagtgatttccggtctagtttgattgtcttggcttatcttcaggagctgagacttgatattcatcgcctcagggaaggtttgattcaagccgacgtatccggaaaagagctcaagcctagccaaatgacacgtttggagcggtcattggcatctgagcggatccctgcgttgatgaaagacacaacgcaacctgttgcctcgttcttgtctgattgtggccaggctctgtatgattacattcagtcgttggatcaaatctctctccaaggccctgtaataatcgcagcccttcggaccgttatctgtctatgctgggacatttacagagccacagaggttagtcaggttgatgaaggagaattccaagtctaccttcagatgggccgaaagatctgcgggtcgttgctcgactcgtcccctcttctcaacccgctccaagtcgctttatcacaggccctggatcgattccaggaagggtgggctttgacgactggtcttagcatgcaaagaatctgggattcttggagacatgtcactcctatctctcaagataagttgaattctctaaccgagttggagtcaacagtctttgatttcacaactttggctttgcaaacccgtgtggaattgtctcaattgagtcgtgtgcgcaactcattgattgatgcccagcgattcattcttctggatggtgctgatggtgacgtacttgttcaggtattttagatctgctgccaaacccgaagaattatatatgctaactatgaatagggtatcaaacaaaccgtcgctgagctatctcatgcagttcgacgttcagagtcaaccgagtatccatactttgcaaacgatttcgaagctctttgccagtaccacgacatctcctcatttttccagaacccagtccacgatactgtcatccagacagtcctgccactcctcgctggtcgtgcggctcgtccattagacacgtcgaatttccaaagcgacgtgccaaatattctccatagaatctcgctatttgcgggttcttcaagcaaatccgagtctgcgcttgctactggtggtattatttctctgtcgctattggataagctggcaactatcggcaatacaaaattggggcagatggacatgcttgaggcagagaaacaggctctctccaaggctatttccttgagcagtcaacagatcacaacagaccagtccatggtccttggacgtactatcgctaagctcacagccgagctggtggcttgtcatcgggagttcttcgagcctcgctcagccgaggatctcatctctgttctgcaagcgatccaaaatggggatctttgcgttgaacagtcacctatcaaggttgaactagaccaaagcttgccaaatgctctcttctttaggcccctcgccgaacaggctctaccggctctgatttcgtccctccaagcatcaagccagcagcagagcattcgaaccactggactggcagcagtacagctagcagtcattcttctgcgtctattcgtccccgacaagacatttgacccttctctcggtctcgttgttcaacgcaaacgccactctcaacgtctgcaagaatacacggccaagtctgcagcaattcttgcctttgagaagtctttcaccaaccaggtttccaacctccggtctgaacttctgcacaatgaaatccgtgatctaggttctgccccccctccttcactggtaaaccggccccagcagtcccagttgagtctcttgcagggagagttcgtcaatttaatcaacactgtcctgaagagagacccggagcaaatggtccgctctgccgaatcttcgcagtcccaagacatgatccagcttctgcgtaataacatcaaacaattgagcagtcgtcttagcactcactacagatcctatgacgatataaccgtgcccgtggttcgtttcttgcagcttttggaccttggtgtgttcttggcgtctagccagccggaacagtctggcgatattcctgatattcagtctctgagcgcgcgaacaccctttttaggaggtatccaccaccccgttcttgctcaggatgatcggaaggcccctggcaccctgaagaatgcaaacgaaatgcgccttcaagaactgtcggccctttgggccgccaaggatgcggattccacaatcttgaatacaaaggctggacgagatattattcgccgtgttttcgctgatttccatcaactatggaagactaagctcgaagaagatcgggagctagaagccgaaaagggagaattgtaccgcttcaagggatcctgggaagaggaagaagaagtcaacgaagccgagctacatgcacttttccctacattcgatgaaggatcagctgaagacacagaaacgacggatgctgctgaccgtattgaccccaagagcatcgctctccggcttgcctcgcttcatgcaaatatcgtctcgaatgagcgcagtggaactgcattgactacccttgtcaagcaatcagggcatcttttgggctcaatctggtctgaaaacaagacatcattctcgcctatgtcaccccagaaccatcttcctgcagttcttctacttctcgatgatgccataggcgagggaaccaacaatcaccaaaagaattacaacttctacaccgattcgaatctcgaagaggcaaggaagctggttgctctcgcgctttctgttcaagcccgctttgcccagatccaaactgcctggcctgaacatgttgtcctcgctgatgtcattcaatgctgcgtgcaaatccttcaattcaagcacactgaacctgttgccaagttcatgaccaaggttgaaaagcttcattcattcgtacatgagtggcagaccgtggccagcagagaatattcagctgttaccgtctacgacgagattacatctattctcattagctggcgccgtcttgagctgtcaacttgggctaagctcttagatatcgagaaagagcgatgcgaggacgaggtaagtgcttggtggttcatcgcctatgaagtactcatcggcgctcccatcatgatggtcgaggcaggcgaacaagacatgaccgaacacacccaaaacttggtcttgactctagagcaattcttcaattctacaactacagggcagtttgctcgccgtctacagcttgttgcaaacttccaagcattgcttgaagttttcaccacagattatccctgcctcaagaagcttgtctctgccttggacaacttcctccaccactacggacccttccagcctggggtggacaagtatctgacggagaagcggtcggttcttgagaaggatatcaaggagcaaattcagcttgcgagctggaaagatgtcaacattgtggctttgaaggaaagcgccagaaggtcgcatgtgaaactattcaagttggttcgaaagtaccgtgcagcccttggccagccagttcaatcaatccttgaagcaggccttccggaaagcacggaggagatcacttccatgtcacaagcagagccggttcgccccactgccacgttccccgaggcaatggccatttgtcaaaatgataaaaagctgtggtccactcgagcgctcagatttcagaagccggatggaacagccaacaacatgatgaatttgtattcttcaattccagccgagttcgacattgcgaaggatctcgacagcttcattgtctccgtgattgaaagtatgaatgagttcaagtccaagacacccaaggtcctgaacgaagacaacaaggacgacgtccagcacctcaaatcccagaaacgccgtctctatgccgagaccctcaaacaactatatgagatgggtgtgaaacgtaatgctggatcgagtgtgattgaaacccaagaaacagttcctcaagttctcgccactagtgccgcctttgaggctggcgctgcaacctcaactgcagttcagagtgccgactggtacttccacagacttctggatctcctgcctaagacccgcctagcgtctcgcaactattccgaggagctaagcaacgtcgaagtccaccgaagcatggggtctattgagcatctcattctcaccgtccgccgccagagaggtgtcatttcgcctgccctcacaggcttgggcaagctgaagtctacgcttgacaaggtgcagaacctttgggcagcgacttcaaactatctgtcgcaagaccatgcttctgcatcggagaagcgaaccaatctagctagaatcgtggcttggctagcgcctattcttggacttgccgcaatgattattggagtgcattccaagttctcgggaattgacgcatctaagattgtggaacagctccgcgccaaaaaggcatccttcgatagcctacgcaagtcgcatgaagctcttcccatgcttcctacgaggattgcgtctaacgcaaaccacgagatcgcgcagcaggcacaatcgtcgctcgatgaattggcggctgacttgaagcaatggagtcaagctcgccctgatctgtccttcgcgctggatcagattacaccttgggtcaagacaaaggttgctgatgtccctgaggttaatgatgagaacagcctatccatccaagccttcgatagcagcctcctgacggccattgacaaaatgctcatcggcctgcagaagctcaaggatgtgccttctgccatcacctttgatggattgctgtcgaggagtgatgagttcttctctcgcggtattaaggctgtccatctcccagagatcaccgccgcattggagaaggtccttgaccaattgcacctcctgcaagatcactccgctggcggtctctccgttgctgccgcactgctcaccagtatcttgcctatcgccaacagatactaccaaatctgccgggatctggctgatcggttcatcgccgttcaccgcgagatctgtaagacatcctacatcctgaccaagactttcaagcaggtcgcctccgaaggcttctgtagtcctgccgaagcctcccaagatcaaggcaaggaaggccagatggaaagtggaactggtctcggtgaaggagaaggagcggaggatatcagcaaagatgttggtgatgacgaagatctatctgagttggcgcaacaagagaacaagaaagaggacggtgatgatgagatggatgattccaaggatgctgtcaacatggatcaggaagagttggaaggtgatgccgaggatcgcaaggacgaggaggaggagaacgacgacagtgccgaggaaggagatgacgatatcgacgaagagacgggaagcgttgatgaccttgaccctggtgctgtggatgaaaagctctgggacggtggtaatgatgagcagcagaaggatactgagaatgaagaaggaaagggccaatcggaggccgagcaacaagctgctgctcaggaagagaagggcgacaaggatgaaaatggtgaagaaaagcaaaaggaaggagaggaagaggaagaggaagaaacagaagatgaagaggcccccgaagacgagggtgaggcagttggacgtgaagaaatggacgtcaccgaccctcaagcaaaggaagaagaaacacttgaacttcccgaggaaatgcaacttgatgatggtgaaggcaaggatgacaatggcgaggacgacgatgacatggatgaccttgacgacgatttcggtcccgcccccgaagaagaagcagaagggaaggacgaagatgtcaatgatgaagccggcgaagaagatgccgaggcagcagaagatcaagtgccaggtgaggaagatgaagaaatggccgatgatgcggaggaaaccaacgaaggcgaagccggagaagaggaggaagaggaagctggtggcgaagatcccgaggagtctgagcaagacgacttcctcgcacagcgtgatgagaatgatgccgcaggtgacaacgtcgctcctagtgaagctgttactggcgggctcggagccgagcaagaccaaaatgaagaaaagggtgcatcgggtgacgctcagcaggagagcggctcgactgatcccagtgccaatgtcgaccaacagacaggcgctgctaaggatagcgaggagagccagcccagccgagacgctgctggcggcgaagatcacgggccagatgaacctcagatgcaggcattcaagaagctcggtgatatcctcgagcaatggcaccgacgacaaaaggagattctcaatccatctcaacaggaagaggaatcccaagctatgccccaagacactgatatggccgacgcggactttgagcacctaaaggatgacgatgatgccgcagacacccaggcccttggacaagcaaacgacgaccaaacgcaagccctcgaccaaagcaagggtgtggagtccgacatcaagcctggcgagaacgatgttctcccagacgtgtcggacgagcagcaagatgccgtggacaaccagcttgaggatgagatggaaatcgaccgcgagaatgttcccacagatggcgagtccgttggcgccttcattcctagcggtcaatcatcccacgatcgcgcagacggagcacaaggcaccgaagaagtggacgaggaactggacgaagttgactcgcaactcgcagcaatccatctctcctcttcgcttcccccattgactccacaagacgaagcccgccgcctctggtcgcactatgagtctgccacaaacgacctctccctctccctgaccgaacaactccgtctcattctcgcccccacaatggccaccaagctccgcggtgacttccgcactggaaagcggctgaacatcaagcgtatcattccctacatcgcatcccagtacaagcgcgacaagatctggatgcgccgctctatcccctcaaagcgtaactaccagatcatgctggccgtcgacgacagcaagtctatgctggaaagtggcagtggtcagctcgcctttgagaccctcgccctcgttgccaagagtctgagcatgctggaagctggtgacttgtgtgttctcggcttcggtgacgaagagcacgttcgtgtcgcccacgaattcggaaagcctttctcctccgaggcaggctcccaggtcttccagcacttcagctaccagcaaactggtaccaatgtgcgcaagctgattgccgactctatcgctctcttccgcgaggctcgctggaagcgctcgcctggttccggctctgccgatctctggcagcttcagttgattatctctgatggtatctgtgaagaccatgataccattcgccgtcttgtcaggcaggcgcttgaggagcgcatcatggttgtctttattatcgtcgatgctgtcaagggtagctccatccttgacctctcgcaggctagctttgaggccgatcctggctctggtggtgagatgaagctcaagatgaagcgatacctcgaggacttccccttcccttactaccttgtcgttcgtgatgtgaaggagttgccctctgttctggccactgcactcaagcagtggttcgccgaagttgtggatgtgtcgtcttgatacccccaaaaataaaaggagttggaatgcggatttagagttatttagttacatttgacggcgttggatgatttttctttgtatatgatagattttatagatgtgatacatcagtcgaatgtacaacaacattttttaatttctttattcaaattcccgtatgtcatttcctacagaatgttatggtatctcaatgctaatgcgcttgacaaaaattcccccaaagtggccttacgtatgctacaactaccatccgtacttggatccagcttccctcttgttcctccgacccgttgcaaagctttcctccagtgcctccttctgagagcttgcaacattgagcaattgctgtagggtatgctttcccggcgcaatggagcgtacagggttgtgctgcgctccggctagctcggtttgcgccagaacctggttcgacttgtactcctcgtccgtgttgaaggtacgcacctgtgactgcgacggcgtggcgttccgaccgaagagctggcgcctttcggccttggacaagttcaggtcgttggcaatgctatccaaggatgacgtaggattggatgatactgttgccgtggaatagtctatggcgactgatgcaggctcggcgagtacttgaccagctgctgataactcttcgtcttcggcgttgtataccagcggctggtaggttgctgatggtccaggtgccgggcctggctgagaagtggcctcgtccgaagatagcgagaagagactgactttgggttttggtggtgcaggagcggggacgggggcctgctgtagaggttgagcgctcggcgctgctgccgaggaaggttttggctgctcggcaatcttctcggcattcttggtggtctttctcttcttttgaggtcgtccgacggataacggtctgaacatcatcggatttccttgcaatttgacttccgctggggttttcattgtgtccgccagtgcatctgatgcagtgtcgggttttgagctgccaggtgcagatgtagtgtcctccgcatctccgcccgccagattttcgaatgcgtaatcattcttcatctccgcatcagctgtgcgatcaaacccagggcctgctcccgttttgagactaaacggttttcgtgttgtcgccacttgtgctttcttttcgagtgttcgtttcggcgctggaaggaaagcgttgaatccggaaaagccccctcctccaccgagacgagcctttttgcgcggaccatcttcggtttcttcgccagatgtgtgttcaggttggatttccggaatcgcgacgcggatcttgcctgggttgctgcggtcgaccagggatccagttttggagccgagtttctttgccctgccaaacttgggtgcgggtgtagtggttggctcggcgtctgagccttcagagtcagagtagcctactagacccatgatgggagagttttggtagagttgttgttgtttccatgacgtttgagggatttggcgacaagttaaattatttgccgcctgaccattcaggcatcatggtattacgtaatcatatcatcccgaatctcgatttgggatgatggaaaggagaagcaagacattacatagtggactgagggacggggatggaatggaccaacgagaaaaatgtccgaagccacagcctaaaactctcctttgacagtgaaacaccagggatgatcccatcactttgtaacgtcatcgcatccgggttctccgcttcgaatgagcttagcaggatcatacattggacaatggtgttaatagacatgcatagtcacttggatcatctgaagcaaccagccctaggatctgatctgatatatgtagaagttgagacatgttgataagtcaaaataggagtgactcgacggaataatggaataataacaccaccatgatcagaaagtaagagaaatagtttctaatagagaccaaatcgacctcataaaccaaattgaccaaatattaatctcccaaatagacatatcagctcaataggggtgttcaagagttcaggtgtgaagtccataatgaaagatcaatgcgtcattctggccgctgcccctccccacttaatccggacctcccattccagcttctctccttatccacccccccccccccccccccccccccaaccccccccannnnnnnnnnnnnnnnnnnnnnnnnnnnnnnnnnnnnnnnnnnnnnnnnnnnnnnnnnnnnnnnnnnnnnnnnnnnnnnnnnnnnnnnnnnnnnnnnnnnnnnnnnnnnnnnnnnnnnnnnnnnnnnnnnnnnnnnnnnnnnnnnnnnnnnnnnnnnnnnnnnnnnnnnnnnnnnnnnnnnnnnnnnnnnnnnnnnnnnnnnnnnnnnnnnnnnnnnnnnnnnnnnnnnnnnnnnnnnnnnnnnnnnnnnnnnnnnnnnnnnnnnnnnnnnnnnnnnnnnnnnnnnnnnnnnnnnnnnnnnnnnnnnnnnnnnnnnnnnnnnnnnnnnnnnnnnnnnnnnnnnnnnnnnnnnnnnnnnnnnnnnnnnnnnnnnnnnnnnnnnnnnnnnnnnnnnnnnnnnnnnnnnnnnnnnnnatccccccttccctccttccccccccccccccccccccccaatggccccaaagcccgtctaatcttctcttcatgccgagtttaggaggtttattgaagaagaggcgaacgaaggattcgcaagaccacgggaaaccagatactcagaaccacgacggttcaggcgcatccatgcaacccgcttcacacggtacgccccagcaccacacgggtacgggtacacacaacaatgtcgccagcatcgaccacattataaaccaggagcagccgaagcaagagcgtgttacaaagggaaagtactctcaggaggactttgagcttcagcgcaccttgggaacagggagcttcggccgtgtgcacctggtgcagtctaaccacaatcatcgcttctatgcaatgaaagtgttgaagaaggcccaggtggtcaagatgaagcaaatcgagcacacaaatgacgagcgccgaatgttaaatcgggtgcggcatccattcctcgttaccttatggggaacttggcaggactctcggaacctctatatggtcatggactttgtggagggaggcgaattgttcagtctcctgcgcaagtcacaagtgagtgatcccatgaccacttccttggttttgtgtgtgtgaacaaagaactcatttgtcattagcgcttcccgaacccggtggccaaattctatgccgcggaggttaccctagcgctcgagtatttgcactcacaccagatcatctatcgtgatctgaagccagaaaatcttctgttagaccgtcatggtcatctcaagatcacggattttgggtttgctaaaaacgtgccggatattacatggacactttgtggtaccccagactacctagcacccgaggttgtctcttccaagggatacaacaaatcagttgactggtaagtctgctttcaatgcttctgtcgaattgctctaactgtcctaaggtggtcattgggaatcttaatctttgaaatgctgtgtggcttcactcctttctgggacagcggatccccagtcaagatatacgagaatattctgcggggcaaagtcaagtatcctccatacttgcacgccgacgcagtcgatctgctctctcagctgatcacagctgacctcaccaagcgcctcgggaacttgcacggtggcccgagcgatgtcaagaaccatgcctggttcgccgaagtcacttgggaccggctggctcgtaaggatatcgatgcgccgtatatcccacccattcgcggtggacagggcgatgcaagccaatacgacaagtatccggaagagacagagcactatggccaggaaggagaagatccgtatgtatttctttccatgccacccgcacgcctgactaactagttccagatacggtcaccttttccccgacttctaaggtgcttgtataattttatgacgcgacgaaaagtcctttgggggagggccggaactgattgacctcgggaggagtcgtgaaaaaccaggagccattatatgaaaatccatacttttctatatgcacatcatttttcttagcaattacaatcgaattcttgtgtttcttttttctttcaattgcctgctcgatgtacaaatgggttcgtcgtgaaccctgttctattcccaatctctccaaccaccggggcacaaaaagccacgcccatattatacacgggctaccaggccgcttctatcgtacagtagttcatacacagaggtgtgtgtgtgtgtgtgtctttttcttcttgtttcgtccttcaaattccttgcttctgattcgatgatggatccaacttagcccaggattccgctgccgccctcgggcatgccggtagccatggaggcaatggcagcagcatcctgaccaccgagacgcttggtttccacgccgatacgggcgatgtaggtcttgcttgtggtgttccacatggcgatgtacttctccatgcagctggacaggcaggtattctccttggccgagagcgaggtaccgggggcaggaacgcaggccttgaagcagtgcttgttgattttctgaggttgatgttagttggttgccggatttggatatcaagggtggtgacgtactccgatcagggcgcgggcgttcgacatggcggcctcctgctggagctggcgcatgactgctgccttgatctcctcggaggtctgaataggagcgggggagctagaaccgaagagcgacattatgagagagtgaggttggtggaaaagtgcaaatgagatggtgttgaattggatcgaaccgaagaaagtcggacttcaggatctgagatgcagggttgtggctggtgtgttcgctgcgccacatccgatgtggacaccttagcataacgagctgtatacttcacctcccttgtctccacgcctgaactttgcctattcactctttcttgtcattttttcgacttcctcaaggcctcttttcttatttctttctcactgggttttcgggtcctggtgacaccgtaccccgtctatcccacctccagtctatctttgaaacactttgggctcccctccattgagccctaatacaattccacaatgcgtcttccgtctatttcctcgcttctctgcttcgcgggcttggtcgccttacccgtgaatgcctacgatgacccaaatatcaaaagcatccccgtatgtgctcaatgttgactccgtttcaagccgaggtactaactttggacatctgtcagcttcgcacccatagcctctctccggtatgatcataacccgcgaacacactgtgcacggatcgtgctccgaggaggaatatcagtattgaccgatgtaacagccatacctcgattcagacttccaaagccgctggttcgacttcggaggagatacagtaatccgcgctgacaagtgagatattccggtcttcaggtggactctgtaatcagtgctgattttcgtctttgttcagatacgttcgcctcacggctgaccggccatcgcagcaaggatggatctcctcccgcgtacctctgaccgcaaccaattggcaggtaaattcacgaaccccgcggaacagaatatgggccaaaagctcacgtacgcctctgctagattgagctcgagtttgagatccacggctccggcaacttgcatggtgatggatttgccctctggctcaccaaggagcgtgccacacagggccctgtcttcggttcgacagacagattcgagggtctcggtgtcttcttcgacacctataagaacaaccgccccggcgtgtcgttcccttacnnnnnnnnnnnnnnnnnnnnnnnnnnnnnnnnnnnnnnnnnnnnnnnnnnnnnnnnnnnnnnnnnnnnnnnnnnnnnnnnnnnnnnnnnnnnnnnnnnnnnnnnnnnnnnnnnnnnnnnnnnnnnnnnnnnnnnnnnnnnnnnnnnnnnnnnnnnnnnnnnnnnnnnnnnnnnnnnnnnnnnnnnnnnnnnnnnnnnnnnnnnnnnnnnnnnnnnnnnnnnnnnnnnnnnnnnnnnnnnnnnnnnnnnnnnnnnnnnnnnnnnnnnnnnnnnnnnnnnnnnnnnnnnnnnnnnnnnnnnnnnnnnnnnnnnnnnnngggctcggtgtcttcttcgccacctataagaacaaccgccccggtgtgtcgttcccttacgtcatggcgatgatgggcgatgggcagacctcctatgaccaggcgcatgacggcaaggcgaacgagctagccggttgctctgtgagttgacattgattcgcggctgttttggatataccgctaactgttcacaggctcgtggtctccgcagcgccccagttcccacaaaggctcgtcttacctacttccaggacaagtccctgtccctggagctacagtacaagtccgaagacacatggaccgagtgcttcaatctttccgctgaggattctaacatcgccatcccctccgtcgcatacctgggcctctccgccgagaccggcgagctgagtgacaaccacgacatcatctccctcaaggccgagaacctatactcacttaaccgcgggaagaccacagaagaccggtccaagggccgtgtccgctcctcccccaagcctgttaaggagctcaaggagaagagtagctggacttggttcctcttcaagatcgtgctgttcttcggcgttgttgtcggtggttactttggctggacggtctaccggaccaagacccggtcatcgcgtttctaaatttacgttgtatggacatttggtaaagcacaggtcttaaaccttcttctgtgcggttcaagttggtctctgggtttgcccagtttttgcatatatagcccctttgaagctcttctttttactttcatctacgttcagctcgcactacagttcttgttatcttttctcttcatctttgaaatgaatcaaagtcacgatcattcataatttgctctgatatgcagcatgatgcttggggtatcaatagtattacaagtaataaaacaaaacgccgcccaatggagagacctccgtcgttacttctgccgttctctctcctcgttccacaagccatctacaatctggaagacctcagtaacgctgcgcatgacagtatcatcaatccctaacgcgccatagcgatgctgaatcttatcgggatgccagcgaatgcgctccgctttaagcgtaccaagcaggtccgccggcggcggagcatggcgcatgaactcctcaacagcttgaggtcgaacatcaaccctcttcccagagcgaacaggccagaagagcagattgcgcagcgacttaggagccgattcctccgcaaccttccgaatagtctcccatctctccaaatactcagcccagggtgcaccccactcagtctttgctctcttgcgctgcgctcctcgccgtagactctcgtccatagcacgttcaaactcctccctcccagattgcgcgttcctctgagcctcctccttccttttctgctgccgctcagcccgcagccgctcctgctcggctaacatgccctcccgtgtccgctcccacatccgtcgacgtacgtagtcaacatattcctcctccgtcatctgttctagctcgccctccggcccgcgttgtacgtccgggacacggtagttatggatgggctggccgtagacggattcccagtatgcggcaccttcgtcgtcgccgagagcgtcgaagagtgactcgcggaatgtgtccgctgttgagttgaaggagttttcgtatgtcgggtcggacttcttgtcctcgcgatggtgtcgcttggacggttcactgtctcgtgtccgtgatctgtgacggtgtttccgctttcggtgaggctgactcccatctttgaagcgaaatgcccgggtgtggcctgtccgggtatgttctttggggtcctcggtaggtttggtggctcgaggatgctctgcggggggagatgccccaggcccctcggtaggtgtggggtttgagttcattataaattgtattttagatggcggagtagctccaattggcagacctcattgtttgggagttgttgagtcaagtaaaacatcgggtgaatgtcaaaaagttgaaggagccaacctaatctggaaagcggagataacgtgtcttagtcatcttatctccacccccacatctacaagacctcatagaagacatcgcctccgtaagaaaggcattgaatgtataaaatctaaatttgggacacagcttctggacgatcatcgagtcttcatcttctgagggtttgagcctccatatggatattttaattgtaaaaatagtgtcattatttgaagaagagctaaagcagagctaagaagccaatatgtgtcggtagagctataagccttgaattctccagacctggcatgaaatcaaattcaaattatcaagtgagatctggttgtctttctctggtaaggagatcggttggtggccgaacagctcctcggtcctgacgatcaatggtggaatatcaacttgacacagccactgtaagaatgaattcaaaattagggtgacaaacgaccaaaacgacaccgaagaccaaggaagacttaccaattcacactgtttcgtgctctgacccagtgttagcaacgcttgttgcagtttcatcccccgtatatagtttatcttgaatggctgatccctcttgccttgtccaatcgtgcagagcgatatggaagcaatgaaatatacaggctgtctctgaagggaccaagttttttcggcagtttgtggtggactcaatgactaccagtgattgcattagtagtagcatagtagcgtagtcttgtcaccgcaaacctgatgtctggtctgattttgattagccagtttagcataccgaccatcatgtggtagtagtcatagtcgcctttttgtataacttcggctttggagatgatgaaaagagaacaagagcacttttataacgggggcatcgccttcatcgctgtaaatattcttttccttttgatgtagcgacatgcgctgatcggtatcagcgaatcatgcagatgtgacctgtcacactgatccttgcagcggttggggatcgcaacgatagcaacggtgttgatagcgttggccggacaaacatagtagagtaaacattaaaaacaagagtgcgggacaggtcgaagtagagaatgtaattcctacaacctaggacatcgggctaagctgggtatccatattcaagtcattcttttattcttttactattcttagcgtcaggcgctaatacccactcttggtctatcgggctatcgcgatatcaacccaccgcttctctgtccccgcgtctcaaaacaaacgcctcctctcgatcttacacttcatttacttaccttctggagattttcattcggatttacgccactgcacgtgcctactccctgaatctatgaattgagtggatatctttggtacctcagcttctatggaggggagcgcgaatgtcgcaatcgctttaccaacaacaggataacacatcctacatgcgattttcaactgtctctcactgctcagcataggaaattttctctcatttaattctaaacattacgatcttgtctttcccgtcactcgttatcttgctactccaacgttccttctgcgacaaaccccggcgcatttcatttgtttatcgcacacggtagcgcttgcccaacatcttctcgcattctgcacttgcattgcaagtgcaccaccattcgctatggcgactatcgcacctccctcccgnnnnnnnnnnnnnnnnnnnnnnnnnnnnnnnnnnnnnnnnnnnnnnnnnnnnnnnnnnnnnnnnnnnnnnnnnnnnnnnnnnnnnnnnnnnnnnnnnnnnnnnnnnnnnnnnnnnnnnnnnnnnnnnnnnnnnnnnnnnnnnnnnnnnnnnnnnnnnnnnnnnnnnnnnnnnnnnnnnnnnnnnnnnnnnnnnnnnnnnnnnnnnnnnnnnnnnnnnnnnnnnnnnnnnnnnnnnnnnnnnnnnnnnnnnnnnnnnnnnnnnnnnnnnnnnnnnnnnnnnnnnnnnnnnnnnnnnnnnnnnnnnnnnnnnnnnnnnnnnnnnnnnnnnnnnnnnnnnnnnnnnnnnnnnnnnnnnnnnnnnnnnnnnnnnnnnnnnnnnnnnnnnnnnnnnnnnnnnnnnnnnnnnnnnnnnnnnnnnnnnnnnnnnnnnnnnnnnnnnnnnnnnnnnnnnnnnnnnnnnnnnnnnnnnnnnnnnnnnnnnnnnnnnnnnnnnnnnnnnnnnnnnnnnnnnnnnnnnnnnnnnnnnnnnnnnnnnnnnnnnnnnnnnnnnnnnnnnnnnnnnnnnnnnnnnnnnnnnnnnnnnnnnnnnnnnnnnnnnnnnnnnnnnnnnnnnnnnnnnnnnnnnnnnnnnnnnnnnnnnnnnnnnnnnnnnnnnnnnnnnnnnnnnnnnnnnnnnnnnnnnnnnnnnnnnnnnnnnnnnnnnnnnnnnnnnnnnnnnnnnnnnnnnnnnnnnnnnnnnnnnnnnnnnnnnnnnnnnnnnnnnnnnnnnnnnnnnnnnnnnnnnnnnnnnnnnnnnnnnnnnnnnnnnnnnnnnnnnnnnnnnnnnnnnnnnnnnnnnnnnnnnnnnnnnnnnnnnnnnnnnnnnnnnnnnnnnnnnnnnnnnnnnnnnnnnnnnnnnnnnnnnnnnnnnnnnnnnnnnnnnnnnnnnnnnnnnnnnnnnnnnnnnnnnnnnnnnnnnnnnnnnnnnnnnnnnnnnnnnnnnnnnnnnnnnnnnnnnnnnnnnnnnnnnnnnnnnnnnnnnnnnnnnnnnnnnnnnnnnnnnnnnnnnnnnnnnnnnnnnnnnnnnnnnnnnnnnnnnnnnnnnnnnnnnnnnnnnnnnnnnnnnnnnnnnnnnnnnnnnnnnnnnnnnnnnnnnnnnnnnnnnnnnnnnnnnnnnnnnnnnnnnnnnnnnnnnnnnnnnnnnnnnnnnnnnnnnnnnnnnnnnnnnnnnnnnnnnnnnnnnnnnnnnnnnnnnnnnnnnnnnnnnnnnnnnnnnnnnnnnnnnnnnnnnnnnnnnnnnnnnnnnnnnnnnnnnnnnnnnnnnnnnnnnnnnnnnnnnnnnnnnnnnnnnnnnnnnnnnnnnnnnnnnnnnnnnnnnnnnnnnnnnnnnnnnnnnnnnnnnnnnnnnnnnnnnnnnnnnnnnnnnnnnnnnnnnnnnnnnnnnnnnnnnnnnnnnnnnnnnnnnnnnnnnnnnnnnnnnnnnnnnnnnnnnnnnnnnnnnnnnnnnnnnnnnnnnnnnnnnnnnnnnnnnnnnnnnnnnnnnnnnnnnnnnnnnnnnnnnnnnnnnnnnnnnnnnnnnnnnnnnnnnnnnnnnnnnnnnnnnnnnnnnnnnnnnnnnnnnnnnnnnnnnnnnnnnnnnnnnnnnnnnnnnnnnnnnnnnnnnnnnnnnnnnnnnnnnnnnnnnnnnnnnnnnnnnnnnnnnnnnnnnnnnnnnnnnnnnnnnnnnnnnnnnnnnnnnnnnnnnnnnnnnnnnnnnnnnnnnnnnnnnnnnnnnnnnnnnnnnnnnnnnnnnnnnnnnnnnnnnnnnnnnnnnnnnnnnnnnnnnnnnnnnnnnnnnnnnnnnnnnnnnnnnnnnnnnttctgatgctcacggtgacagtgaagaccacgtggatactggagactctgatgctcacggtgacagtgaagaccacgtggacactggagactctgatgcctgcaggcctaccgaggaccacgtcgaccctggacattctgatgctcacagtgacagtgaagaccacatggatactggagactctgatgctcacagtgacagtgaagaccatatggatactggagactctgatgcctatagtgataccgatatcgatgcagaccacctagaccccgactattctgagcattcggctactagggcccagccaaaacagaaatcatccagtgcatgcctctgcatcgagagcggctttacacctcacctcctttgtcttctccagggaaagcgacagcctagtagcgatatcctaaatgctgatcaagatcagtcccacgatgcgaatactacacgaatcaagccgcaactctttgagaaaattgctggccgtggtacacaatactgggcactttcccccgagaatttctgtcggacccatgctcgactcctcgccagtggaatcgggctccgcagtaagccgaataatcaaaaactcttcagccgcttacaatatatcttcgagcacctggagagccttgcccatatcaagagtgacccgacatgtgagcagtggaagtggttccaacaggcggctcggacccctagtcccactgctgcacatggggtctttaaatacccagtcgaaatgcctaagcctcgcatcgaccagtttgccgcgagtggcatgactgcagacgagatctatacccgggtaatcggtccccccccgacggctcccatcgcagacttatgggatgccgatggctcagtggtcattcctctcttccgctggcttggtgagaagaaactgcttggctgtacccatagcgccgatgtcccctgtgagcataccggcggtctctggtcgatgattgacttggaattcgacatgtatgagcaccaccgggcccagggcgagaatcccgccgaagaaagtgtgaccagcatgggatggctccggtgtatgtggcacggtctgatccagcagctcatccgccaggatcccgcatactatgccttttatgttctccttcgcccagatcatgcgtggcgcctgatctcggtcccgtggtactcgaaaagtaccagtgccggagcccagaccgcatttcggcacctcgatatcaatatcccccgctatctcagccggggtcggagtgctaacatcatacagggcgcggtcaccctgagcgacgaggacccggcgaattgtaccgagctcctccttggcatgcaccgccagggactcttgcagcagtggtgggaacgggtcgagcagcgcggcctctccaaccagaatgtcgttcatcgcatcgccagtgggatgtggactgccgctgatgaggccgattttggcctcacgtggcagcgccaggtctgtcaccgaggggatgcgcgcatctcgcgcccggagctcccctatggctcaaccggcccggccacccaagtccgacgtaccgtcctcccatggtttattggcattggcgaagaccatgagcagctggatactcacgatgccggtacgtggtctgctgtcgctgcgtcgcatcgcgatctcatccccgccgagagaggtacccctggatttactagcgtccaccgcggagctgtgccatatgcattcccgggcgcggtccacctccagggacttggtgcgatctccgatgcgctggttggacgccgccgatggaccaataccagtgtcatttccgagctggacgttctctttggggccgatacccatgcagccgaggtctttatccagcaatggcgccagcgagcagcgcaggcatttcttactactttccaagaggtccagagactagaggtcttatactatggagtaaactccttttttcgcctccggggactagtataattttatatggccgactaagaattcatataggcttagggtgtgatttacttctatatatatcgtagataaggaatttcagtagtaattcatttcttctataggattcatttctagtacagcttttaactttgatcattggcaccacgtaacaggattgatagaggcttattcggggcgctttacggaccgctcacaggggcgcaggtagcgattatcccacagtatcgcttaacggagctcccgctcgcttacaccaactgtttcagcgattgtacggcagaccaagcgccagtgttcgtgggagatggcagagttcgatatctgggttcggcgaagcatgtctgaagcaagctcgcggcttcccagaggcgggatcggtagacaaatggtcctgtcccacagtcgggatataagtgatattcttcggggctcacaggcatcttcgtccagtcagtatatatatatatatatatatatacagtgaagtcacaggagagtgtagagaaaaaagaaggaggtaatttatagggcaaagacataaaccgaaatgaaaagccacggtttgtcttgcgaaaaaagagagaaagagagaaagaaatgaggttgagaatcaatggtgcaggcttggttgtcttagaaactggtggtcgttgcacggtccttgtatgaaaactatgaaagagattcatattcaaaagtgccagctcgttgtctcttatttgcctggtcgattgccagccattatctcgtcgcgttatactacgtagtataaacttgaaaactcccctatagaatgggtggatgtttccttgggctcttctgaaaaaaagcgaattagagctgaagtaaaattacagttataattcgttaccgctgagaaaaggctgtgaaattctttaaaaaagaaatgtgagagaatgcaggtcgcttggttttagttgttatagttacttcgtccactaccatatggagtatcagtataactttgaaatggtctgtttaggaacaacgaggttgatcattgactgaagaataagccagtctgagtccatcaactacttccaatgttttatcacgtatggattgcacataacacaattctatatctgcggctaattcctcttatactctagctacaacatcaaataaggtgtcatatcttttgtaaaaaaatcccttggaagaccaccataccataaagaacattaagcaagagtaccaaaagagaataccaaaaagacatgacaaggactagtaaatgcttgtaggagtttgggttgagataaggttatgccaagagggcgacgagtgggactgggatcacgtggtattgagataccaagctaggatatgatacgataatctgggcagctctctaacatcccccttcttggtgaactacttagaaaagtcaagggcttgaaagcttgattgaatgttgaatgtgctttgttgaataaggtgaaagctgcaatatgtctgtacaacgccattccctaacccgaaatccaagccttccgcccaaaacgtaattccatgtccgaaagagcagaggatcaaatgcgataatgcgccatattcttcttgatctcatccacaatctccacagcttcattggtactccttgcctcaaagtcataacgcttctgctccgtggcatcattgccgcgcacaatcatcacgcggaagctcttggggtgccgtcggctgaccttagatccgatcacgtcactgaagctgatcgatcgggtcttaccgccggacgccgttttgcccgtatcaccgggcacgatatgcatataatcattctcaaacgtgaggatgcgatggttggatgctgtgaaagacatgggctgtttgcggaacacgtggtatcggcggtaataaccgcctaggtggtcttgcttctgagaagatgagggcaacatgcgctgcgcacccttcttggcctcctttttgctcttcttagaagttgtcgggtctgcggtgtccaccatcaaaggcgcatttggcgatgagctgcctggcgaggttccgagtgcgagaggcccgccgccgaagcgacggcgcaccagatcaaggtcggtgatgttgcccaatgcctccactgtgcggtcaagtggtgcaatcgtgttcgaccccatcacctttaagaggtagttgcccttatcctggccccatcttttacatacagaatccagaatctctgctatatagctatcggtagatgtgttgatggtcatgacatgtgcggaagcctccatgttgatgaaacgaatcttcaatgtcttggatacaccaagtcggggagtcgcatgcgagataggtaccaccgggcgatcggcaggggtaagagtgctgtggttgagtgcagacgagaatggctggcctaggatagggtttgttcggcctggtgtggcctgagggctctttttctgtgcagtggattgcgcccctggtactgcaagattagccggctgatctgcctcttccaacccaatgcttgaactaaattggggatgtagccgttcattctcctcaaactcggagttcgatgcttcaaccagtgcgaattcatcatatggcttgccccttgaccgtcctcgggacttggcagattggttattgtttgacgtaaaatccgtcattggaagtgtccgcccaagcgctgggaagtcatactcgacttcgccatcatcgaccatccgtagcgtccatcggttcacggtcaagttctcgcgattaattggtggaccgcgaccgtcggccgcatatttccatagggcaagaccaatcgtctcagcaacggtcacttgtgcgggctgttctgcaagcttagattcgcgtgtaagtgacagatcgagcgggtcttcggggtcgcttgaaaaaggaacgtagatcttcaaatataatgagtcctcttgacctcgcccagagagcaccacgaatttatccactggattgcttggtgctcgcttccgcgacgtaagctggctggtcaataagctgaccggcttgaccatgctgataggtcgtggcgggggaagatcttgcaatacaggagccggattgcgatgcttgcgcggtgaattattctgcggccctgtgccagagggtaacttattcatcatagccatgggcgaggacaaattcaaaccgcccgccacgcctgccagcagcaaggagccagacccagccgtattgtcaaaatcagatgaaagtgcagaaccaacaaactcggcaccagagtcctcgtcctcctcgtggagttctccgagagctaggctctccgcgcctcgactgccagttcgctcgcgccgtctgcggggatactcgacgacctgatcactcgcggagaattgaacctgtccttgtttgtagcctctaagttcggtttcgttatccgtcgacagatcactgctcgtggttgtatctccacgggggcgtggtttcaattgactgaactgactcgcaacgttttgtgttgatgcagatgttaccatcacttctggccgttccctccggaccccagaacggattggagaggagtcggcgcgatctcgatggatgggcatcttgtcaaatttgatctgatcaatagcactgttgttgtcagatagggaagtagaataccacacaataattcaccaacctgctaacgtctccaacgttgtccccatcgtcgtcgctgtcatcactcagatcgctgctatcgtcgtcctctgcttgcgcttgtctctgaacctcttgttgcctttcccgtcgagttttcttctttccgcctcgtgcatgattccgccgcgcggtcatatccgtatggcttttgccggtcaccatgccaccatcatcctcgccgtcttccaggccgaggccttgcaaattgtggtgctgaggtttcgcatttcgttccgctagcctgtaatattcagatgaaacgtttgccgtggttggaatcggtggggagtaagtgcgcttcagggaggagctatgtgtgttcgggtacgcagcggcggttgaccagcccgccgcgcggaaacccggtggannnnnnnnnnnnnnnnnnnnnnnnnnnnnnnnnnnnnnnnnnnnnnnnnnnnnnnnnnnnnnnnnnnnnnnnnnnnnnnnnnnnnnnnnnnnnnnnnnnnnnnnnnnnnnnnnnnnnnnnnnnnnnnnnnnnnnnnnnnnnnnnnnnnnnnnnnnnnnnnnnnnnnnnnnnnnnnnnnnnnnnnnnnnnnnnnnnnnnnnnnnnnnnnnnnnnnnnnnnnnnnnnnnnntgtcgggggggggggggggggggccccggcccgccgcgcgaaagccaggtgtattcagcacggagtcattgacgttgataagtcggtccccgattccatctttgattgttgagagataagaggagcgtaattgccagatcgtaaagcttcactcgggttagtccttggagacccttccgcggcgatttgagggccagtctacgattccggacgcgacttactcttcattgtgaagaagagacattttccaggctctcacgaggacatacgtctgtaataacccaggggtatgctgcgcagtagcgaccgaggtctagatatctcacagcagctctagctaaaagcgcatgctcggggaataaagggagggaaagcgaatgagactagctcatacaggaccagcctggaaaaaacagataaaagagataaagagatcaggaaaggagagcaaggagggagagaaaggagagttgtatgtcggaagcaagatgagagggaacttcggtgttcgcattcatttccccgccaagggggccacactagtcaactacatcgatgtttacatctccgtacaggtacaacacttgacgaatcaattattatacacatggttatactctcagtcttgaggaatattgagaaatctgttggcggaacatatcatagtactatgctggactactctgcctcaatggctgacgatatgacaacaagcattgagattcaaatcgaacaagactaaactctttgaacatcatcaaaagtgtacctagaaagaaaacacgacactctctccaatacctgtgagtttatcagccgctgccaatgcatccttccactgatccagaccaaattggccagcaacatagcatccgtcctcttctttcaggcgaagattccccctctcgatcatcttgatcaatgcaagaacatcctttcgctcatacatccagtttcccttcaatgtgatattagaacgtgtaacaaagacatttgggatctcaagctcttcataggcacccatcagactcacccggcctccaggtctgagcgacataatgccggatttgagatggaaagatcctcgagccccaggaggagaaatgtcgaggaatacatccatcggaccgaatttgctgatgttgtaggcatcattcgtgcggttgcctgtccaggttaccgtggagattctttcgcaagaaccgttgaaagtgcatgataggatctgattgagacgcatgagcttagcatcatcgtgagaccaggctacaacttttgcacctgatattcagttagccaaactcctgattgtctggggatatctttggtagctaaagagagatattacccatagccaaagcaaccatgcatgcagcaacgccgtttggataagtggccggagaaatcaacacggtttcaccgggcttcacgtcaatgctactcagtccaccgaaaggcctgaggaatgtcgcaatagcacaaagttgttctggggtataattaaagccccaattagtcggatctcccatcaacttaccttcatccaatggatagcaattctcaagtggtgccctcatgaactcggcatatgagccatctgcaaacccgctataggccatgatttccttgatttgagagtcaaatccatgatacacggggttggaaaatcgaaccatctccgggttatctcttcctttcatgaccgagtcaaagaagatcagttgaccaaccttcagagtggttgcatcgtcaccgacctggctcacacgggcaattgcacttgagccgggaataatcgggatttcataaggagatctgaaatggttgtaaaaatcaaaacctagcttactaaaagagtggaggggcgttgccaggatacgcagaagaacacttccgggcagtagagacggcatagggacttgttcaacttggggttcggtaaatggagcaggccttagaacgagggcacgatgggtgctttgaaccaacggaagaagctttctgtgcgggatgattggacgtggagtgtctggagaatctgtagacagacagttcagtgtttatactcatgattggcgagaatacttgacgtacttgttgtgacattgtcagagtcactagattcagagacacgagtcatatttgcatgcaggaacaggtctgcacagaagaagagtcgagatagcaagagctgagataaaagaagtggaagggtttgaaggcattcacgaggggataggaatagcgggaaagcagcgagagaagaaaacaagtcctaagacacgtcaaaatgtaaacaactaaattggtgtactcagagacagcagattaaaatgcaccaacactattgaaacgcgtgctccttgacgaaacgataatatgttacaaaaatgagaatctctcaagccttggccttggccctactcttacgagctttcttcggcttttcctcatcggcatcgacgtcaccatcggtcttcttcgtcttcttgcccttggccggtgccttctttttcttaggcaagctcacatacttgtccttcttcaggtcaagttcttcgtcctcatccttgatctcttcaacaacttcttcttcgtcggatgcttcaagggcatcttcaatatcaggcttgtccttcttccccaccttgggtgccacaacattgctggccttcatgaatggcatcgggtgcgaacgcgagttgtacagacgcgtgaaggtagctttcgtctgtgtctcaagtttgatcttagactcgtccattgggcctagtcctagttcaaccatggaatcaaagtcctctcgagtgagatagtattcatccatgagatcaatgaccgactcgacacagtccttgccttcgtccatcattcggcgtatcatcttctcctggagcaagggcatgtactgttgacggatctcgtcgcgattacctgtagtacgaagacgcatgtggccctgtatttccttgacgtatcgggagagtttgcctgaagaataaatcagttagagagtgtactatacagagaataggggaatgtccaaaacataccatgtttgctattgttgcccagccagctagtaaatgcaggccgcccatttaagtttccgtactggaagctggctggccgcacaaagctgaagatcgcatgagtgggcataagactccattgctgctgggtgccgtggatcatgcggtcgacgaggtcgccatcgctgatactcgaagcggcattgtccatcaattcaagcgctttcagtcgctgttcctcgccctgatatttgcccacaagagcaggtttagttctgaggtagttctcctgaagcatcaggtagctgaactcatgatcgttaaaataaagctcgatcttgtcattcagggtagcagtggaactcggggaaaacatctgggcgctgagaattttgctgacaatatcccacggcttgagaatgatattcttctcccacgactttgacatttgcttcccttcatcgtaattaagacccttttgatccagtcttgctgtggaaagcatgttgatgacctggcggatatcggcatgtgttccctcaatgaggccgtcgagtacaggaggcggaatcttaaggccttctcggaaacagatagtggacagtcttgcccgaatttgctcagcagtcgggcgtctgaatggcacgtcataggtgatgaagtcgaaaggtttcatctttggaagctttcgctcattgcagatgaggatgatcggaatcttggtcttcttgacaatggctgcgacagctcccacacctccgcgatcaccggcagacatgccatcaacctcgtccatgataagtacgagctttttcttttcactatcgacttgcttgccttgtccggcgaaatatccttgcaatgatgttgtatctagcacacccaaggtagagctctcgacaagcttcttacttctggtgtcactggcattggtctccacgatatcgaatccttccagcttcgccacgagatgggctgctgtagttttgccgattcctggaggaccgtgaataatgacggcacggtatatccccgagccgtctttgccgccttttttgaaatcggcctgggcattggtatgccagtcccgcaaccaggtctgaatcttttccacagcactcttattgccacagatcatactggtcgatgttggggcatacttcgtggtccagagatcaccagatattgcgggctgtgagcttggtggcgtctgagacccggtggccgaggtcttggatgcttgagccgcggccgtctttcgtttttgctcatctcgtttcttctcctctgcatcaatttcggccgccatagcacggaccttggcctcgtcggctttcactttctcggcatgcttttcggcagcctttccatccccgccgttggcagggagtcgtcgaatcaattcgaagagaccatcctcgttgatggtcttgatcttgtgcttcgcaattgtctcaagcttctttgggccggcatcagatccgagaactacatagttcgtcttagaactaggagcccccacgactttgccaccatacttcttcaccaattgcgcaccctcttcacgacccagggattccaaaataccggtgaaaacaaaggccaaaccagcaaggcagttttcttctccaacgggcatctccttagtcccagccattgccggttcccggctttgttgtgctccaaatttgaatttccttggctctccctcaggaggctctggggcgtcaatcgtaggaatgctgtcgaaaatatcttggagctctttgctctctggtttttcctcctttttggcctttttagggctagccttctgcttcttcgcagctgatgctgccgcggctttggttttcggagctgcctttttcgtttcctttttgggttcttggtagtcgtcttcatcctcgtcgatgagagcttccgatttgcgcttgcgaccaggtcgagccttcggggtaggaattttggggagatcttccatgaccacgtcatcctcgtcatcgcgagaaggttgcttcttctgtgccttcttcaatcctgcagtgactggccttacctcaagcatttcgaagtcactgccatcgtcattatcatcctcagccacataatcatcgtctcctttgccggcttttccatattcggttgcaaaaatgtcatcggcgccaagattttcatcctcaaggacctttgtgggtttctttgttgataccttagtggtggttcgtactttgttcgcaggttcttcggcagtcttcttgggtttgggattttcggccacaatcttggctttatcggactgaacttgctcagttggttttgtaggccgtggtttcttcttattggaggcgaaatagtcggaggaagttgtaggttcttctttagtctcttcgggctttctgtagaggaagctcatcagtcaaatggtatgagacatttcaatccagcgatggacatacgattgacttttggactttgctttgatagcgggcgctttggttggtgctacatcttcttcgtcactgtcatccacaatctttctgctgcctgttttcgcgttagactggtagtgcaggactatgggttatggagagcatacgtctctttcttgtggcagaggagtcctgcattgtcggatttgaggttagactataatttcaagcaatacgaagggcaccagtacacatataaagtaaccaggccctcctttcgtgagcaaggcaccagcttacctcttttttagctgcgggtttcgtagcggcgtcgttggagccttgactcgacttgccaccaaagaaattccggatgtccatactgagtcgcaattaatgacacggaatttggcacagaacagtaaatgaaagcgcggtgtatggccaatcgagctcttgccgcagcgtttgctagatcgcgaacgacgcgccacacttccggggacgtgactggctgacgtaaggcagcacttccttccattttaggactagcgtatataagctaagactacttactaactataagaatcaggaaaggactccaaggcctcattagcactccttacctcaaagtcataaacgcttcaggcatgagatgtttgtatatagtgtcattggtgccgagagatatatatcggatagcaccggctgtgcataacatatcaaactattacaggacaagacaagaggattaccagtcagacatattacatatccatagtttcaattatcgagttgcgcagcgcggactttctttagtatgattgagtgcatcttccatcaataaatagctatttggagctacaacgtactatgttagaatataattagactgaaattgaggcctggttttcaaggcataatttagcaagtatggataatgtcacgtgctctgtgtctttccactttgggactagtgtaaatcatcgaaaagtgccggagtaacgaagcctttcgcaacattggtatctctcgccgcctccctcctcacaatgggtccccagatcaagatgtttgctggaccgctttccgcctgcacacggccaactcgtatgagccatttaacccccataaaatccattcggccgaagactaacagtgcgacatagtgtcgggaccgctggccaccttttctctatcacgatgcttctctaccacctcgcccacccttgattggctgaccccgaaattccaagaaaaatccaaatcccccaagggtcgccctcacgttgctaccggcggatccacccgaggaacaacagtcgtgtggggagacttcggtctgcgcatgaaagaccacgaccgccgcatgcccgcatcggcgttgaagatcgccgaagagaccatcaagcgacggcttcgaggaatgaactataagctgtacaagcgtgtcagcgccaacgttggtgtgtacaccaagggtaacgagcagcgtatgggtaagggtaagggtaagttcgactactggactgtccgactgcccgtgagccgaatcgtctttgagttgaagggagatgtccacgagaagattgcccgcgaggctttcagattggcgggccacaaattgccaggtaggttatgcattttctacattactactactagtgcgaaagatgctcattcttattcattaggtctttgggagttcgttaacaaggatgacccgcctgtcgtcggtatcacaaagctcggaaacggagtcactctcgactccctcaagcgagctcgcagagacccgcccattggtaccaatgacctcgtttcacctccgcagagcacctcatccagctccgactctacacaataaactgccgcttcctgcatgataccgttttctcttttttcatcggtcatgtcttttgcttttgtcgtctttgccgactaagccccgacaccagagccaggcccatacccctgctgtctgcgggccttggacacggcatcgtcctcgtcacgtttcatatcttttgtacattatcatcagctgtttgcgtctctttaggagccgtcgaggcacgggctcctctgatggatcttttgtcttgatactaggagtttagacaaggaaaatatattcaggatttacctttaccggggtcagctaatgctcccattcctagcttctgtgcctgggcatcctcgtcgttgctggatgctggccctgggctatgtgtccctagatcagggctcgcttcgcttatagtgtgcttctggccaacttggatgaggtcagtcattgctatgcctagtgcactcagaattatctccaaggaagcgatataccccctagctgtccggtctgcttgggaggactcttagtgaattccctaatagactcatatctgcaccctgtatattagcgaatagcaattgcaagagatggtcttgattcggtccatactgagtgctctctccgcccggttccatatcaacaagtctggggtcggacattttggatgatattcgtatggaatagaggtacaatagtagaattgtattaggaaaatcagatgaatgctattccgatgttcccactgggtggtccagtttatgaatgacggggatgcgatgacgtatgttaagaggtcaactgacctacacaattcaggtttcttgatatcattgtataaaatagtatcgaatgtgctctatgtacttagaatcgaccattgctacaatacggctacagcttcgctgttgaaatatatagagctacgagttgggcacgtgtggttccagaaataaatagtcttggtgcattctttatactacaacatttagcaacattgcgcgttgaatcataatgggggatcaagcacaacatattcgaaaacgtatcatgaatcaaacccagacacaattcatagtttcctcagagaagttgattcaggaccaattcgaatactgggcgacacccccaacaccctactcgaccctggagagtatctaggatctttacgtctattcatctcaaaggcacagtgttctattcgcaatcatcgtctagacgtctaaactagttttctcgctgtggacgtataccctggaagtcacgcttacttcgtcctggacgttaacaatgtcgactatgtctatgagaccgctcataccgatacgagtcccattcacatctacgttcttcgcctatcgaagaggaaaatcagcatcaacaggcagcgacagctagacgctaccattgctaagagatttagagcgatgcacaatgggcatggggatgaccctctaccgttgcttgatgattttaatcggactgttgaatatcacagtccccgtggtcttcggcggtagatcttcaacgtgatcatctgagtttcctctatcggagtttgacccccatctgatttgatttttgttttctcaatggaagctgcaatgctgggggcgcctcagcccaaacccaaacgtgcaaccttgaagataaccatgagtgaactgtgcaatccctttgctcaagtgatacagactttagcgacgtcctgcgggtccagattccggagagtagacccccatcacgacaatccttgcgtaatttagatacagtgatatcaatctttgtaagcaataccgggagtccgtgacttgcagtattaaatgaaatgtgatataacgccagaatccttttcaaaaatgccttcacgcgcctggaaaaaagtgaaaagtaaattgcatacctggggatttcgaaaaaagtgcagttctgcataatagcagaccataacttccgagatcccatgctcaccgaaaaccaccttagtgtacaaatcgtcattcatccattgtcttggtttgttgacagtgagtaattagaaatccatgcccatcagatagctaaagtgctattagttatatgcctccattaaattatccaggggaagtatacctttcatagatgcgcatgaacttggccacgaaggcttcgagatggaagattattttctgtatcgaaatattcattagcttatattgatggcaatgctaaccatcaataacttacacttcccagcttgatgcggtgctcatagaacgcagaccacttgataacttctggtttcagagcatcgtcaactcgtgcaacaagcttgaatgtcaaggtctagcaccagcagttaatatctggagcatgttcattgaataggtgtatacacaccttcaaaatagttgttggggggatgcaatgggtcagaagatcataaagacgtgcgcggacttgcaacagccgagctggtgaacgctcagccataatctcatcagccgttagggcaacaagggcttcccagtccggaggcgggatgagggtcttgtctgtaaccttttcactacatttccaagaaaacgtaagcttctaaaatccaggccaatgggaaccgaagtagaaactcacttttgcgcataaatagactcaaacatgagcagcgcacgacgcagattgcgtccactctccttcgcaatcctcttgttcagcacctgagactcggtccatccttccttttttcctgcgagatggagcgcagagcaaatgtcagcttcagttggcgctgcaaccctgaccagcagggttcgagaccgaatcggtgcaatgatattggaggtactgttggccaggagaatcaatcgtagattgggactgtatttctccatggtacgtctgagagctgcctgggcatctcgtgtgagatgatcggcttcgttaatcacgacgaccttgaaccgctgcttcgcgccgagatccacctgttgcgtctgcgcgacctctttaagcaattcctgaacgactactcggtcatagtttccgacatctgcgggggtgatctcgagatggtacaccgatgagacaatattgaactctagctttcggttgctcgtcgtttggaagactctggcgtcgatcttgatcttctcgacaccggggccgtacagttcttttagtgttgcaatgacccgtgttttcttgccagcgccggagggtccatagactagtagatggggaaaatctccgctttgtgcctgttaggggtaccttatgttaaaattgtgtcctgttccgcagctcagactttcttaccagtgaccgcaggcgatcagagagctcggggtggtatgtgagagcatcgagggtgcgtggccgtagtttatccacaaggagagccattttgaaaactctgtaaagctgttgagatgaggaatcgaggtgcttgtggtttggatagaggatgcggacctgagaacgcgtccagacacgcgcctaattaatcactggtccgtgcacgctcccactataatcagcttcgaagaaatgatttcgacgtagatcgtacaattacatatgaataaatttaacgatatatacagctatatagttttctaggcatttggcagccttccgccaaactccgatatgtatagtacatgcaaatttgctttgagagatgagatgaatgttgaaaaagcccgacacaacaccacgcatgtttctttgttcactgttaatgtccaagcctatacaaaccaacacagttgaaatacagtaccccaatgcgcccttggtgtgagctttttatgatgcaattggcgtcagaacaccattgtcatcatatttagcttctgcgttgggttagatcaggccaagaaagcaacgagtagacaataaaacttactgaagaaggtgtatgacagggtgatagtatcaatgcccttcatattagggtcggtagcaaagtcgggatcgatgaagaagaagacaggcatatcaaccgactctcccgcattgagcttctgctcctcaaagcagaagcattgaatcttgctaaagtacggcgcaacctgacctggcgtgacgctgtatgttgcaactccaataatatcctgaggacccttattcgttgcggtatagaatgccagcgccgtctcgccgggcagcactcggacttcacgctgctggggagtgaacttccaagggaggacatccgataccgagccgttgaatgtaatgcgcaggcgacgagaatctgtcaccggcgtcacacgtgcagaggtatcaccgtcgccgattcggtgggtgagaatgggctgaccgccccaaccggtctgctggcaaatctgcaagtgggatcagaatgatattccgtttatgatgtactctagatcgagggagagcttgtcataccattttgtagagagggacagatccatatgcaagggcaaccgttccaaggatcatactgatggtatagtacctgatcgggggttttgttagcacatggattccctccggtccgggttaaatggcagctcacaatgtagagttattgcgtttttgtgattccggggtattgaaaggcgctgtagatgaattgcgttgttcatgaagcaggaaattcttcgagaaataccttcgctccacctcgaagacgctctttcggagatggattgatcgctgtggaattgttaccgtcagcgcagagcgccccagcgagggggttaatcgtgaaaacatggttctatgactttaatgggattggacgttgagtcgcatgagatgcagagtatccaacacgtgataattctgattcaacgccttatcgataaggccttaagcttcggagtcacgttacatttaaacggcgggcgacattgagacaaggttagaaattagaatgtatgtgtatcttaaattgattcttgatttgttcatgaagattaaccgaatcaagaattttaattagaaggttcgaccgcacccttccggctgccgaggctgcagagttggctttagcagcgactcattactggtatagaggcataaacattattcgccttattcgccttgtacaaaagatatcattaagttcgggaaatttgaaagcattcatatgtaatgatgcagagttcataaaaataatacagggtaatggcacccagaagttagacccgaagtataaaataaccaataactaatacaaccgtttgatggcatcgaagcatttcactggaagtctaattcaacacactcgacgtgatgcgaccaaacacccctcgtaccatgctaggtcgctcacggaggcaagtgataagaacagcagcgctaacagcaaatgcgatgcgctctcggtattgatactgggaaacacaacacgcgtcagcatctcgtgattgttttggaacatgccacaggttaattcgaagacattaagaaggagttggaggggatgtgggtgtaaccctgttgtgaacagatgatgcgagggtccgatacatacctttttctcatacaaccgtggcaaaaccgtggcggcagcccggggtgccacaaatagcgccaactcctgcctcttccgcgtcttttcaaccaatatactccagccgcacatgagacatcccgcaccgacacatagcccagagtcccacatcatcggagtgaccgtcttcgcgtcaaagaccttggggccgagtcgtgtccgagcgagacagacaccgtagtaaaataagctcacaaaagatgcgaggaaggcagatgagcgtgctgcatcagaaagggcccgacgaagggcatttgcagatttcatcctgcgcaggcggaaaataatctgtaggggtatataggttgcacaggcatatttgaaggttctggcaaatcgatacaatgcgtgtttttcacagctggggccacagcccatgtgaaccatttcgcaagggatcgggacaaattttgatgggtcaccccatacctctggccagttgtaatcattgcacatcgactggagaagaggtgcctggcctgtatcctttccatagacgaaaactcctcgtcgagcacggcgcaaggcttcaattaaacgtgagtcgacctgagcagcttccccgatccacttctcataggctctgggcagtctttcggggagataaaaccacgcccacatgaccacagccgcactcatggcaaagacagttgcgtcggcgaagccagggacaagggattcgacagtcgtccagcgattctgggctcggcggcgacgggaccagcgaccccatgcaacacatgcgagcgcatctacggctcttgtgaccatgtagatggtgaggtccattgtcctccctgctaactctgggcggtgatgttccagcgaattggccataagctgactggagtcttccccctgatctgtggagttccggatagttctaacatcttctactggcagacagatgcggttcttgttgagcagttgaaaactgaaccatccagatagaagagagatgatgaatctaattaagcggtccagcctttgtgagatccgaacgtcacgcttggacagacctgccgtgatcaatgcacacagacgatataatcctattggtagtagggttgagccaccgaccagggaagcacaagctgttgggaaactgttcagacgtaaaggactagccaagactttagctaactattcgaggtgaggtcagctatagcattccgtttgtacaatagactagaggcaagggtgacaagataagtcgcgataagagccccatactaggtaatactacgacgtacctcttgaagtttctgttgcgcagtccaatcgttattgcgcagtcggcggacataagacaacaatttcggggtgacagaagataggtacccgagtgcatatgcgcgaaggaggctacagtcgtaatcagcaagggctcttcagatcacacagttgcaccaagccacaagggtaacagatcgcatggactcacggcttgaatatccggacgttgtcccttccatggcgtctccggagtgcaggttccatgctgccggaaaccttcatgtcatgatccgtcgggaggtgtcaacatcacagtcccccggactaatcggcgacgaggggtcagccagctgtaaactctggtgggattcacaagaatctcctcgccaattagggaatgaggtataagagctcaatgggttttatccgcgggtgacctacaattgcacctcccgaaaattgggtagtattctccaacagggggaaattgacacctacacgaccgttttctgaactatggatcaagtgaactccgtgtaatgagcctgttagagacttggtggttgtacctcggtccgtacccaggtgggaactccagaaaagcccccgcaaacaagatccaaaatcgggggagggacctgtttcaagagaagacagagggcgatcatccgaagcaatgagccttttccctttcggagcagattagtcggtattgcggggctaaacaaggcgaatgatctaactccaaccccataataagaggatgatctcaggagaacaattcccaaacaaggagatgaaccgcactgacccaatgatccttgtcaataagaacgagagaaaggaatatataagagaaagggcaaattgtattcgaatgtacaccagaaaacagctggaagagagggtatctgcagtgtactttgcgttgacaagtcggtgcttctctcgcagggccctcgggaagggttctccgggagtcaacagctctccccaggaacgtatcaaataccgatggtaccatataagccacagcggaaccgccgtaatttatgtactgttacgtcacgcgctcaaatttttgcatgtgatcaggccgattgcttttgatgcgaaactctccacgtattcttctataggacgcatctctcttgctttcgggcactctcttgatcttcttcttttgctttctttcttcgcactttcttctggtcttcttgttcctatccccattgcgctgaaccatctccttatcgagtcgcattatcagccctagagaactcccgtggccttgatctacccccgcgttcctcttttgtggagtcaaaccttggctatcatctcgagcgcatacaatttttcactccattccaaggcatgacagtgtcgccttggtccgcgctactctttccatcagagtagcaaccgttttcttgacaccctgtgaatattgaaccgcttttcactatgaatggacatggcactcaagttcggactgggcgcacgtctcccccggctgctccctttggatgtgagtcgctccgggcattatttgtaccgtccactctttaacccgattccagactcgtttctctcccccatggacacaccctttgaacaggcacctgctctacccccgggaccttctcttcttgacgataacgaatccaatatgcttgataacttctttactaccatgaacgcaaaccactttacgaatgatttctggatgcgacaagaacataaatccgggacacccaactttgactggtcaggtgagctgccgcccaacttcgaaggatcaaccacatccctatcgcagccctcatttcagcagcatgggctagggaaagcagccgggggaatcataacagacaatcctacaagctcggatatattcgccgcagcttccatgctctaccacagtggtctgaacggatcggagttaggatccacgttagcacaacaggctttcgcgggacagtctctccccacccatgggatacaacgaaaaattaattcacatactggcagtgtcgcacagggttcagcttcatctccaccccgggctggtgtcccggttggatatcatacctcggagatgttttttgacgtccgtgaccccattcctgcggaccaacatccatcaagaaaggcccgcagtttgcgatggggctcagatgccagttttatggaccagggctatcttcgcccccctgatcagcctgacgaggaacagcggacaagtgacctgctcgatcatctcgggtgctttgaaccacaaagcagtgcagcaaacacacgagcacctagtccagagcgcatggttggggctcctcctcaaggtgccgttttccgaagtggagctgtcctggacgagagcttacatccccgaaaacggccaagaaccgccctgaaatatgagggtgacgaagactccgatgaggatgatgcacgacctcactcaagaaagtctagaggatctatcagccaaggccgacgagcatcaacggacatgtctcgaaaagcccgagtacagccagggtccaaaactgcgcgagagaatctcactgaagagcaaaaacggaccaaccatatcctttcggagcagaaacgtcgaaatcttattcgccaaggcttcgaagacttgtgtacactggtccctgcgcttagaggtggcggattcagcaaaagcgcaatgctcactggagctgctgactggcttgaagaccttctccgggggaatgacatacttcaaagccaactgcgcgaattgaagggcatgaatggcttagtgatgccgcgttgataccctctgtcgcacgaccacaacgttaatatatgatctcatggatagccctgcctcttttcttcgcggggattgcaagcgtttcagcgggacagttttgtgtatgcatgtcggcgagttggcatttcatctttgcaaatcccggcaacaagataccatttttcttttctctgcatactctttcttcgtctttttttcccctataaccgctgtaggtgatacaagtcatctttcggctggtcctcggcaaatatcgataccctagtgcataattcgaaaagcctgtattgaacatagtttgagtaaagacattatttctttccaaatagttttgccaatataccaagacatagctttccgcatagcacataaatacgcacgtttggtcaagctgagacatttcagcgacaattttggattatttcagttttcatcggttttcaatttgaaaccttagtacggacgaatatgctaataaaggccaagactaccaagaccctgtgggttggcatgctatctactccgtacttccgtagtatctccatgttttgtccccaccgctctgtattgcccgcatgtgaagacgcgtcaacatccttagttttgtacctcgacctaacaccctcaactcactatgcctccaaagcgaaaacacacgggcgacgatgccccgcaggaggacgactccaagggctacgcctatctcaaaccgcacatccgccgcgtcccagagaaaaccatcaagtcgaaatgggcccctctaccggaacccgtccagggaaaggtcatggacatgttccactccctcgagcgaccggtgataatgcggaatcaaaatgagcgcaagcgaatcgaggcgcagggcgccgtgcaagcggtcgtgcgaaagtagggcgccgtgcccagtctggtagcttccacagagctaccagtgtcttgaaggacgatgatactaaccgtataccgcgtgttgtttagtctaggcaaaagactcccgcgaatgccgtttccgcccataacaaaggactccaacttcgactacgaatctgccctgaatgagcacgtatgcgaccccctgcgattgtcgacagcaagtccatactgattacattcttagcgctcactcgaggcccacttggctacgatgaatgatagcgtcgatctactaaaagctgagattgccaaagaagaagcgctccttgctagggaaacaaaatcgctccaggaaatggacaagaatgcgaaacgggccgaggctgaaaggaaacgacagactaagaatgtatgcagcagattatctcgcttcaaaatggactggctaatgttttacgaccgtaggaacaccccgtgctccgacagttggatgcacttcctcgaactgaggattctgggtcctctgagttcatgcttctcggcgcgaaagatagtcaagtgacactagatgaggtacggactgcttgtgaaccacgcgtgcttgccctgtcaacttaccattctatttgattttagttggagaccgaccccgaagtccaaggactcatgaagcaactacatggccatcttcaatccatggaaagcaatatagcgcccttcgcaggactcggggatgccatcactcgttcacaagctgccttggatctatactcgatccccaatgactgattattgctggacatcactgcacttgcaagctaccaatcccggcattttgatgcttcttatgattgacacatgaagggcctcggacccagggtatgcacatttattagaaactcaaaccaagtatcgcccaagcttggcgatcaggaatcacataggcaatcctggtcgcgtgcttaactccaatgcattcgctgaatagctgcatacggtggaaccgcacggtcgaacgcacctctgttcaacagatgataccgactgcaagggtaaaatatggatcaccctaaatcaagagaagggtaatgcagatatgttgcgcacctagtacaatctgaggagtcatgctctaagggtgatcagacaaccgaggctccaccgcatgaaaaggggaagaaactagatcaataaacacgagcctccaccttttacacaataccaatgtagtttcaatcgaaatccgatcaattgtaagcatagaaaacgcaattccgcagccgaggtggtctcgccccgacagtgacgtgtgcccaaacagccaaccccatgcggagcagttcggaggggtgactccgctttctccatccccaagaacttttcgacgtttaccaactactaccaactggtctgcaggcagccattccgctccggccctggtggttctcactgaactcttgcgcaatgtccgaaaagaatgcgccgctgggcacttccaatgcgacaaaatccagatctgatgcagggaaggatacgagcatcaagaatccgcaaacagctgcggccaaggccgaaacgaccggctcggggagtcactccagccccaagaagcgccggaaggtgaatcacggtaaggtgccgttgcgcagcatgcgacagggatctgggcgcgtccgatcctgttgcgcatcaccacaagaacattttcgctaacgcaattccagcctgtgtatattgtcgccgctcggtaagttaacttcttgggaatgttattatacttggttactatatgcgatacgccatgacatcaatgctagcgcatatctattcaaggaactggctttgctaacggggggttttgctcgcgtgggacagcatatgacctgcgactcggtacgacacctctgtctccctttccgcgttcgcgacccgtcacgtctgaaactttgatcgcaaacctgcggagaataatttgcaccagctgacctgtttaattctgaaggaacggccctgcacacgctgtataaagcgaaacatcggtcacctgtgtcatgacgagccgagggaaactgcgaaacgaggacgtggcgaacacgaacattctgctgcagacgacgagggctcgtctaacaatgaattgggctccgttcaaggcatgcctacgagtgtcgacatagccgatgctgctggtcagcaatcattccctgataccacgatcggaattgcaccctcagttgtgaatccgccttcaacggtgccgcctgggaatctttctgcgtctagtcagtcactcgaggctacctctcagcgtgagttcgcaacaaaacctgttttgccgccggactcagctaacgtggtacgatagtcatgccatacaacgattgggtaggtggtcagaatcagttccaggacatgcattctctccacccttcctacatgtttaatgcacacgaagtgaccaacgagtacaatctgctcggcgatttcctcagtaacagtctcttagacgacggggcaatgttccaaaatcaagatatgcagggaatctacaacgattcgtcgttgatgaactcgatgaatggtatgccagcaccgaacgggttgcctcctccaacacaacttccgccgccagcacagagccaagcactgccaggagactcgattcaacgctcaacctccgcgacgggtaatgacaaagcccgggaaacgtactacatgaccgccgccgacccggcaggaactgacccaccagaggagcggatgaacaagcttctcaaagcgaaatatgatgccggactactgaaaccattcaattacgttaagggatatgcacggttgaaccagtacatggaaaagaacatgcaacaaatatctcgacaaaagattctgcggcagctcgacaagttccggccgaagttccgagaacgcatgcagagcttgactgatatcgaactgattctggtggagatgtggttcgagcgcagtcttatggagtatgaccgagtctttgccagtatggctatcccagcctgctgctggcgtcgaacgggcgagatcttccgagggaataatgaaatggcacagttgattgatgtcccggttgagggtcttcgagatgtaagtttcaagactggagactcgccacgtcatattacacccaactcacatgtttactctctgtagggcaaacttgctatccacgagatcattgtcgaagaccagctggtcagttattgggaaaagttcggcgccattgccttcgacaatactcaaaaggctatgctcactagttgcacgctgaagagccctaaccccaactcaaggagtgacggtataacttgctgcttttcgtttacgatcagacgagacaatcacaacatgtacgtgttcattgctcaccactgtccactagatactgacatgccggaactaacactgtgcagcccgtctctcatcgttgggaacttcctccccatcgatagatagtacttttcggtagactgttatttattccatgacacacaaggacttctcttttggtatcatcgtttgatttagtgattccccaagttctggctgtgctcctcacagaaaaatgtatagtgcttgattttatgtgtataacatcaaacagtatgttttgagtcaaatcatatatacatacgaagtaacagggtctggtgctctgagtagtgtaaatgttctgtttgcaatggtcaagggacgacacgagcactttgggtttgactcgtcgtctctttcgtccctccacgctcttccaactccaaacaatcttccctctcactttcactttctttcttcctcttctcccaacctcttcgtaaccttcattatccccttttatctttcttttcatcttttctcccattggctcccaatccccaagtcttctctccatggcgcaaccgtctagactacacccggctctagctggtacgagccacacatcatgtccccgctatgcgcagcagctgacccccatattcttctatctaggtcatgctcacactttgcatatagccttatctacagtcggaacctcgagtcctctccttcctcccaatgccatttccagactggatagatggctcaagcgtaacccgtttgttgtcatggcaaatacatcgagtcgccagcagctggatatggttggaacattactctggaatgactgcacccatctgatcagcttgcgtggtcaaaatccggaggatatgctgattctcggcaaagtgagggctttcgcgtttgttgtgttgaacatggctgtcatgcctgacctcctaggtttttaatggcctctaatatatgttgaagtgaccttatctaacctcttacaggagacctccgggctctcgatctggccgtcaaggctgcgcgtatttgcattggtataccatcttacatctcacttgatgacttgatcaggtctaacgacaagaacagtgaaccagcaaagcgaaattgcggtaaatatcttgtcagtggcagccacgaggttgtcaaacattcagcctgctcatctcgggcttgacgctgcgattaaccgcactatcaccacccaatacttgttgctccgtatgcgactggtgagttgcattgcttgaacactgctttgtgtgtcaacaccagaattgacattatttcaggcctggttgcatgaacgagcagatatcgccgagcatttttatggcaaactccctgtcttgcataggtcgcatgatgaagagtggattttcgagacttgctttatcattggtgactctgcactcgcacggcgcctgcctgacatcgctatcacatggctgcagagagcgagcgatcacttgcagtccttacacatgatgattaagtttccatattattatgattgggacttggttattcgacattctcttggtgggtgggttgatctagttgatgacccggactaacatgctgcagttgtggcttgttcacaagtcaaaatccctctggcaaccgccatctacgattttgaaatgagctacttgagagaagtacgtttgtggtgaatgtggtagacttgaagctgacctttttagaattacccatttcaccctgctgtgatcctttttgatctatctatgggacatggcaatcctagtaatgacggggcactacaaggtaagactgatctttatcttgaatggaattgaattaacaatattgttgtagccctagagaggctggttgatggcatgacccttacagatatgaacatgccgatgtgagttatcccaattatttactgtaatttttgataaatgttaactgttgatccagaattttccaatatgcccgatctctgggtcatatagggtaccttgatacacctatcggtgagagactttgctgacagttctttagtggttcggatgacggaatggaagcacttcgaaggctgctcatgcgccctctgccagcaggagaatggacagagaaatgctttgttgcttttcttctacttttgagcagatcggacttgtctgattctacgcgtattcaggccctccaggatgtgattgactcactagagcgacgtggatatccatcttttagcagtagggcatctcacgccacattgattgtaaggcatactcaaactctcatcatcttcaattcaaggagctgactattatatacagtgcatctggaaaatgactgctggtgcaatttcccggaatgaccgctggagtgcaaggctatggcttcagttgtgcagtcagccaaagatcttccaacgctgctccctgcccatccagattgtgatacaaaagttagtggaacaagaattgagatttaactagcactgtgagctgacatatttcaggaagctggttgcttattacatagaggctggacagcttgccgacgctcgttggttaatcgatcggggtatagtccaaagccaggaagattgccaaaggatgtacttgtcttacaagttgacattgctggagggaaaaagcggtgctggtacgaatattctatcggaaaccaacgcttctggcctattctaactatatgcaagcgcatttctatctcggctttccttcgcatcccgtgccgcacaagcaactgagccttctttcgtgcgcaatggaagctcagagacaacacaaaccagaagaagtcctgaattgtcttgaaccatttatcaactgtttgacttcagatgacatttatcatcatgactttcccgccgccgaacatcacatgtgagaatgtttcatatttttgactcgctatgcaaggctaacttgcctactatgaataggtttgccattactcttctctccgaagagctatccaagggtggctttaaccagagacttggcaaatgcatcgagactgtactcgaaagtggtgcgttttcccccaggcaatagtaatttgtgatgctaatcgttcaatagccctgtcttatgccaaagaaaacagcctgtttgaaggtggcgatcgggaggtctcagtcactcaactggaatggctgtatttggcaacttacaacgttgctctgaaacttatcaactcttccggattcctgtcggctacgcatgccttagatcactccagagatgtctgtttcgaccaggcaaagtttttgcttggctatgttttactaacatcttttcagtttgcgctccagtatcgtcagattgaataccctgaggggggctccaaagcaccccggccgcatttgttttcggttatttaccttcgtctccttgttagcacacttagggcccgctgtgctgatccgactgcaaaggttagttacatcaattcttgtctacaacatattatcccccgaaaatgttgcaacgttatagtcccataatactaattgtctgcagaaaccgcactacgaggatgtatgcatttgttttcaacaactaggtgacttgcgtggttgggaagatggagaagagacagacgctggcgcaaattacaaagaagaaaagcactataatattgcccgatttttcaaccttgaggctaccatgcacctcaacaggtggcaggatgttgtcaggatatgtgcatccgatgacacgatccctgattcaaagttttacccacagatcatggatttgactctccgattgaacctaccacccacatgggcgatctggcttatcaaggttcgttgtttatttattaccgggagactacattctttgaaaaatactcacatctatacaatagcggatcgtgtcgaaactcaacgagctacgggacgatccccctaccacatggcaacacgagttccgagcctccctgcctcgttacctccactgtctattcatactagccattgaaccggacccctacgcaagcactgatagaagtgccaatcttggtttcaaaatggccgatgctgaagttgctgaagaagtgctcgataaaatcctcgcaatggcagacgaagaggcagccgttgcagaggaaagatacggtacacagcacagcctcaatgccatccaggtcgggtcggagatggattatatgtttacatatccagcgggggaattaatcaatgttgctaccatgtccttcaacaaggctattgacttttaccgtgctacgcgggaccaggattgtcagcgttgggcggaaaaagccattcgtgttgcccagcttgtgcctggtgctcagggcaaagcgctggtcaacgtacttcagatcagactgggaagcttgattggagtttgagttggtgttggtattggtgggctggtttgggctggggtgggtatgtggttcagataaattgtgacaaggtggaggattgtgtgtgtagtgtgctaggtacttgatatgaaattgaaaaactcaaactgattgttcttatgctttcccgatcaaaaagaaatatgaagagaaagaaaggattgatcttcgtggcgagatggcctatagagtataaatatgtgggtatcatcagaagggaaatgatctctgagaaatcagaaagtagaaagcaaaatcgcccaagccacaaaatccggtagatgatgcaaagatgcaatggaacaaaagggagaaatcaagagaatgctcaagtcaagatgtcagtaaataagaaagcaaaaagaaagaatcaaggaaaggcactatgaaagcgccacagcaattccacgaaagccataaaacaccaaaaatgcagtctgtaacttttccgaaagcagaataaagatccccaatgggataacccagttcattcctccccatgcgcatcgcaggaacggctccgcgaagcctgccgcacccccttggaccgcagcgacggggtagacggcatacgatgagggatacgaggcaacttgggcatggccgagtagctctgtttcggctcccgctccatgtccttaccgctactatctgtctctgtctcgccgctctcatcgctgctttgtctatgaccacccacaatgcggagtgtgagattgagctcgcgctcgagctccttttgcgcttgcatgcgctgactcgagccgttgagtttcttgcgatacactcgcagagtccggcacagctgctcggtggatgtgtctaagcttccgacctcgctgcgcggggttgttttcccgcggttgcggaagtcgatggatgtgcggcggttgctggttcttgcggtgtgtggtttccggggtgttggggtttttgattttgggcttattggggatggggaccgccggtgtcggtcttgctttgggcccggggttggggagaggcggtttggaggggaggatctttctgagacggcgtggttttttagtgatgatggtgctagggatagccgagacagcttgcggagtagagttggagagtgctcgcggataggtgttggtgttggaggattcgggctatccggtcgttgaaatccggcgagttcgctgcgggaaaggacttttcggagagggggccttgccgctgtcatttctttgacggggcattcgtcgtcctcccgtgtgtttgcaaggtctggggagacctgttgctggacagataggttccatatcatcacaatcccgtccataccggcactcaccactgtgcgcttggtttgggacccatcggacttatcacgctcctccagaagtaacacatcggttacaccttctgtatggccaaattcaccagtaaggagctggtctcgctctagatcatagacgcgaatagatttatcggtgctcgaaacacctataagaaccttcggagtctggcctgagatctcggaggcaactgtcaaagagcccaaaaccaccgcatcagctgtctccgaatcagatgccttgaaactgtgaagttgacggccggttgggatatcgaatttcgaaacacaacggtccatggtagaaaggtatagaatgttcgagtcgtcgggacagagtgtcatcgacacgggggaagccttttgagtgatgacccttgagatcagataggcaacagatgtgccacaagccacctcgcgtgtcgcgcgacctcttatgacaacggtgcgatctgcggagcacgaaagcaatttttcaccttcgttgatgaacagcaactgattaacagccccgacgtgatcgtccatggtttgaatcaactgcaactcgttgtcccgtgtctcgaatagttgcaccatccgatcacgcccagaactagctatcagccaggtctcgtccattttttggatggccacatccgtaatctctccgccatgggcgcgcgcctcgttgaggcaagtccagtcggcgttcgaaaagattctgcatcacagtcagctaaagaacattcggttcatatcctaattttgtacatacctcaacacaccaaacttgtcaccagagacaaaccagtccgcattctcagcggtcctcagaactttgagttcgtttgccgcatcgtcttcttttccgggaaattggtcgagatcgatattcttcgatcctcgacacttcccttgtgcatcccaaaagttcaccgtaccattgcgagaccacgtgaagaagtctgcagacaagttattgggaaaatccatgcgacaaataccgagaatcgggtcccgatgggccggcatggaagcctcgcctgcctcctgttcaccatcttcacctagagtgtcaatcgggtagacatgaatcgcgcgggttgattcaacagtaaccagatgagaactaagagaccccatgcaagtgatcgccggtgccttgcctttcttgtcaagtgcactcttttcaaggcgcgcaggagaagtcggcgtggatgttccacgtaagacttcaaatgataatcgctgcatttgccttcctcctccacctacccatatggactcttggtcaaagtccacggccaacgaagtgatgctgaacccaacttgctttaccgtgatcagcttctgagatccttcacgatcatcgaaaaagcaaactgcgcctgaatctgtgccgattacggcctcgttttgggatatactgctcacacaggtgaaagtattatcgcctagggtgcccagtagacaattcctgccggtaagtgcttttggggcaaaactgggcgagagggcagctacctcgacattcaaacgtgacttggtcggtgaaacaggccgaatcgccgtgggaagacgccagaccttaacatgccgcaggccggtcctaaagaaaaacattagttgactgctaagtatccccatccgatcaaacgtacgtgaccaaagtatggccgacccagcacatatcattgataaatgaggtgcatttattcacagagtgtaacttggccgagccattcttgaggtttactgtccacataaagagaaatccatcgtttggattgccgagcgtggccaaatattgagagtctgggctaaacgccaggctgcgaacaccaaaggtatgctcgtttagaatggacagaggaacatcaggtaaggcatctctcgctgtcgaaaatatcaagactcgaggattatagccagtcttgacgtcgttagctgccgttgttgtggcaataatttatatctcgattcccacttacctctcccactgcaaggaatcttccattcgggctgattgaaacactcgtcactgctttgattctttccctcgaagaccatccacgtggactgccgatgtcgatgacttcgctcgacggagacccattgacattaagatgcggattcgaccggatatgggaaagggatcgtgatctggggtccgggctgcccgggggagtcgactggttgtaaaaagaagttgacgggttgacactcgtcgcggaggggcgggctcggaagaagcgttgtgttatgttgtcgttctcgtccaattctgcaagaaccgctgctgatccagcacatagcgcaaagcttctgctctgatcatggcatgaaaatccgtttggggttgtagttgttgtgccgatgacggtttggagggacaaggaggattgatggagggtcttgctgggggttcgtgtccctggtcggaggactggagagttcgaaggagtgattttcaaggatgcgctgggtccagcaagcttgctttttgcactggggtgagcggtggtggccatatcctcggggaggcggtcggcgcttcaatgtcctctaagagcgtgggatatttgcatgtcaagcaaagttcatcagacaggtttgaggatgccagtgaggctgtagtaggcgtccggaatttttatgtcggagagtcggtcaggagacagtgtggaggattggtagaattagtgggggcaagctaggatgaagctctgatcagctaagtccgatctctatccacacacacatctataactcaccaaaagagggtataggacgagaaaagtcaacaaacacgaagctcattccgcactaaagcagatcattccagtcagaggaatctgaaccttctggatgcccctggctccatggggttatttgggctttttgcttggcttctgattggcctcttggatttgaggaattaccggattctcacttttgagaccgagggacttccttcgatctgcggaaaagcgtgatatgaacggtgggtcgtgtacgcacaggtcgccgcactacccgcaccatcggctcagcgtgagctttaatgggagtatgctatactccgtacgttggatgtgattaaatcgcaagatcacatcagatcagatcagatcagacccaagggaggctcatgggaggttccactaccgaaggcccacagctccgattgctcgtccgatcgttgcattaatcttggaagtttcctcgattcagtctcacgtgcctggaatacgatctcgtgccccccgatgccctaatctcactggcacaattcgacctgtccattgcgatacatcggcagctccggtgttgaacttcttggcaatcttacatgcccatttctaccaatcaaatagatctgtaccccgtaagcacgaagatctctacacatgtgggatctaacccgtgacaatctccttcaccatcatccacgtagtagctctccccggaatttctcaggaagctccatgttgaaatgcaaccttcacttaagataaagcgagtagtcttggtaagctttggaaggtttcgggtagttatccccatatcatatgacttgctattatgtgtctttttggtgtctttcatattgctcttcgtagaattctgatactatcatgtggcttttgtgttctaaactaccacatagagtcatcatagagcatatacactggtaaagtatcaattaaatacaccgagagcgtatacatatcgtaggcaacttgatacaattgcagaggtaaaactataccgcactttcaaaatactacctggtaataccgcggtggcatacttagtttgtcgctcgtactcgcgatagtcgcaaactgagagatcgcaatagatggggaaaagaatgaagatcttattttatatcttgggttatttgttactacttgcatatcatcattcgtagcctttagtatggaatatagcagacatgaatagccccatggtcttatatgagagacgtacagcttatgttgccgagttatgtatttcttgctctctccccctgctactctctttaatgtctgatgtcaccatgtctgttcaattagacaatcgccagtcgattaatgactattgccgttcttatgcagaggatcaacttattggaggcacgaagtatggcaaccaggtcgttaaactaccgggttgtgacttggtggttaagttcggccgttaagtctccccctacgaggtaaagaatcagcgaaaagcgtaaaaaaaaaccagataccattatagtcccttaggttcattcattttttataggcaatgagggttggggctatatagtatcggatttgattccgggcaaaactattgatcctcttctgaactcttacattcttagactcgctgagtattttcactctattaccgccgatagcgctggtagcctatgtggtagcccgtcaattgacttactctggcccgagtcatacctagtaactggaggaatggttcaatagccggttttccccaaatatggcaaggctcaatttgatcttagcctattggtattttatcatttcaatatagcccctccaaagcttctctggttagatggtggccgtatttgtttattagactgggcatcagcagggttttatctgaggtcattggaatttgccagtctattctttcaagaatatcattccagccagacgcatctgaatgccgtcggttttggctctgggcgtgatgaagaagagctgctgctaccaggcattatacaacaatgaaaggtcctccttataagtcagcagaattgcttgtctctgtgaacaacgctgagccgaaaaccagtcgttcgagggacattttagaatggtcttcgcaccatcgataggctgattccacctttccttttccactactaccagcaccacaacttctgcgttgagaaagggacaaccttctaatggtaatacctaggtagtgtcccataggactagtcagattatcagatgagagctaaagcatgatcgatgttggtacaacttatgtcggaaaaaaggtaaagaacgatgtatatagttctggcgtttagcaatgcaattttcaatacaataatgcagctgctcgatcttctacaaattaatgtatagagttacaaagtcttatcaatagctattgacaataaattccaacaacgtgcacctgtatgtagttgctgagatacaaggaggtcttgctatgtattttggggctcgcttgttagttctcttatcgccacccggatattttctcttcgatgacctctggaacttccagatctcacattatctatcaactttgctctgctcgtcactcccttttttcattcatctacaacatattcccaagatggctaaatgtgctgcctcatcgaggctggccctgcctgccgttctgcgcaatgttttccgctctcagctcaccagcgcttcttcaagcccctatcgccgacctcttgcctccggtccttttttctctttgaatatccatcttcagagatccttccgttcaatttcgcgcttgcatgattctcagaatgatcaacaaacacccgcagcccctgaaaccacggctgtcgccgatgacaccctgccttctcaacacaaaaaaccaaagaaagattacgactcattcggcaagacaggtggttggaatactcataaacgccaccccaaagatcaacgaagggaccctgatagtaccggaagaaccgacagagagcgcagagctttccgcaacgagactcgcagggaggtgaaaaaagaacctcgcagggattggcaagacagagccgaaaaatcgaaacaattctccgagaacagaggaaagagaaagcccgagaactggcaagtgcaaaaagccgctctgaaagagaagttcgccggtggttggaatccacctaagaagctttcacctgatgccctcgatggcatccgtcatcttcacgcgaaggcacctgaacaatttacgactgctgtcctcgcagaggagtttgagatgtctccggaagctattcgccgaattttgaagagcaaatggcgcccatcggaggacgagatggagagtcggcgcaagcgatgggaaaatcggcatgatagaatctggagtcgtatggctgaacttggtcttcgcccttcgacaaaccgcacgcgaaacctttcggatttccatgtgctgtatgatgacaacaatcgcgagcgaagatagtcgtctgtgtacatgataccatgctatatatggggttttgagttgcgcttgtacaataaataatataacctagaggaaacaacatatctcttataactagtaattggttgcagtatggagtagggtgggtatcatggcatttagcccgtagttcggggtttagttcggggtggagctaggagcaaggatatcgtcgccacaactcccccggcaacacatcttcaactctccaaccagcatggttcattcgagttgacagaatgctaatggcggcatatttcaccaagcttcgacctaattacagctcaacgtgccggcaattccctccagaccttggccctcgaaccgcagcccacatgctgagacaaccgccatgccatccaacatccaagtcttcgtgaaatggaaggaccagactatctttgcaggagaggatgtagaatgtactataacattcaagaacgtggccgatactggcgccgatgccaataacgcgggtgaaggacaacattcacggaaggtctctcgagtcgcaaaccacacacccaagtcgaactcggaatctttcttcggatttaaatcgccccaggctctcttttccggtcggcgatcatactccatcagctcccaacggaagccttatcaccggacggcctcgtccctgagctcttcgttggtcggctcccatagctttcctccgaacagcggcccctctacaccgcgagaatggcaacaaggccacaaccataaacgatccgtctcaatcctctccattgatagcgaaggccagaccgatccgacaccttctccttacaatcgacgtcagccagtcaggggtcatgggcgctcggcgagtctccaggttctaccgcggaggaacaatagctacgaggattcttacaaaaaaggtagatgatggacagtgcaaaacatgcgaagggattttcaactaatgagtgtctcgtatcagcgagaactccctctcatatttctccgtttccattgacagaggctcccaacgagcatcccaatggcaatctgagagtcgatacctcccacttggggcgagccacccaacctggctctcgagcgacgagtccaacaggtgccatagagccattgcgtccaccttcccgacggccccaaccacctcccctcgattttaagtttccgcccgcggcttcagccgattcgactaacagtcgcaccgtgcgcaccccatcaccaaagtcggcgacaacgaacggtacatcatcaaccgggggaagacccactctcaaagatgtacagggtctatctggaccggcgcatcagcaactaactcggatcatatcagtcacaagcgtgaacgggagcaaccggagcagtggggagttctactcagtcagcgaccactccaccgagaccctcggatcagaatacacgaattattctctccagaatgggcgagctccctccatgcggcatgcgcggcatcattcaagcgtagttgcatctcctgccaaagcctccaacagccaggcgctgctgatgggctatgcgcaggttaacgcatcattcacggtcgatgggtcgttagtaaaccagtccgccttcgacgaagtcaagcgaaagggagttgttggtggccaaccgagttcaggcggacttcctggccgcccaacgccaacagccgaacgaccacgtaagagcggtgggttctggggctcactcagatggaacactatcgaggaatctatcaatggccttctttcaaataacgagttggacggattacgagaaatgcgtggtgttacatcgtcgagatcaattccgctcttgtccacctcgcagtcgctgctttttgttgacctccgactggcaccaggagaggaacagtcgtattccttctctttctcccttcccaaaggactcccggcgagtcataaaggaaaagcaatcaagatctcatataatttggtcattggaactcagcggcctagcgggcctaacgagccccaaaaggtcaaccgcatcaacatacccttccgtgtttttagcggcgtgaatggtaagttacattctttgcttttccttccatcccaatttctcacgtccttatagaaaagggagacattcttggccatgacttgatgtcaccatatgtacttctacgggatgaagcgaaggtccaaaaggttgggccagtgatgcctgtgtcaacgaagaaccaaagtattagcaagtctcaccattccgcggccgacttccttggttttgtggatgagatcttggagcaacgtgcgcgttccaacacgctgttcccacctggtgctacgccctcgagacgacctagcgtcgaaggattacctcagatgcttacttccaaggatgtcatcgatattgctatccttcgaagtaaccaggctgtgaactctcgccgcagccccaatcgctttgagattgcccgcgagggtaaacgtatcgcagtggtcgtcttgaaccgaccagttcatcgacttggagagaccattatcgccacaatggattttggagatgctacgattccatgctacgctgtgcgtgcctcgttagagacgtccgagaaagtcacccctactttggccatccggtcaagtgccagtattcaccgaaccacacggcgcatccatgcttctctgtttgagaacacactccatgccacccgagtggctttcagccctgctatccccatcacagcgacgccttcaattttgacgagcggtgtgaccctcgactgggagttacgattcgagtttgtgacatccagtgttcgaggcgatcaaggggccccgccatcaggcactcgcttactcgaggccttgtcatcggatgatcgcggcacggtgctgtctgccatggaacatctgaactgtgaatcattcgagattgctatcccgctgacggtttatggagagactgttcgagaacgactgcccgaggagaatgaaggctacccaatctagaactccagatgtacaccacaggtataccagatgaacatgtgcttgcctgctgtgcaggttatgcttgatcttattttgattaaatattccccttgtgccatcgagggagaaactcccagaaatatagaccccaccaggctctagactcccatgtataattgatactatatttgaatcgaaaataacgacagtgcgactgctaccaagtatgtaaatgtaaaatatatcttatagtctgtgacgtcgacgcggtaactggggcaacgcggtcagtcaaccgatcggatctgggcactttatcaactctggtggagctgaaacccgataacatctctctccttgcgcttctctcgaacatatcatccagaattattgtcaggtaggttcattggcattatctgcacgtcagcgcatctacacatctgatggcgtccctcaaatatcggacagcgactagtatctaacattggaatgcaggcacatcgcgatcagcgcaaaccccgccgaaatacacccctaccgaagggattacttttttttcctcgagcctgagagaatatggcttcgttcatcaccaccatgtctgtccccgctacccctcctgctgcccatttcatttcccctggggagcctgcctctcgctccccgcaagcactcccttccgtcatcagcccttccgtcgtgtaccacactactcgcacttcccatctccccctctcggagcctccatcttacctgtcgccggcagtgcgcgcactcaaacagggctgttttggactaacacctcccagcaatgcacgcacacgcgcccccttcaagccccgctcgtccgccaagggcacaaacagttatcagctacgacagtttgccgaggctacacttggaagtggtagcttgcgcaaggccgtgaagttgcccgaaggcgaagatcagaatgaatggctcgccgtgaatggtaagaaacatcttgcggagttgtactgggggtatctgctaacgttttggcggtctagtggtcgacttctacaaccagattaacctcctttatggctcaataactgagttctgctcaccgcagacatgtcccgagatgaaggctacagatgagtacggtgctttttcgacagctcgttgaccccagcttacacgtttggataggttcgagtacctctggcaagactcggagaatttcaagcggccaaccaagatgtccgccccggaatacatcgaacatttgatggcctgggttcagagcaacgtcgacaacgaacaaatgttccctagccgaatcggtgtcccattccccaagaccttccctagtcttctccgccagatcttcaagcgtctataccgtgtctacgcccacatctactgccaccattatccagtggtagtgcatctcggcctcgagcctcacctcaacaccagcttcaaacactatgttttgttcatcgacgagcacaagctggccagcgggaaggatttctggggaccgctgggtgatttggtcgatagcatgttacgcagcgactaaggattgaatcgggatattgggtagtgattgtgttttgcatctgatctccgcagtcagggatactggctgttctacggaaaggtgtcttaatggcgtttcgggtgcggcatgcattgcagtattttagcatgggcttttggcgtttggggcttgacctgacgcgaagaccgaagcgatgaatccatgtattttttttttctgatttggtaacaagaacgccttgatggttattgtaggttatcgcagatgaatctccttttcagtctcagcctcgggggaagcagatgacaaaaagagacaaccacattgttatccttcttcctgttaaatccactctccatactccgtaatagcctacgataacctacaatacccaatcattggtaggccaccagatgcactaattatagctaatatgccgctaatctgagatttgatcaatctcatgtttcctgctgcatagttgacccgaaactcgatggatctccaacatcactagcgtatggatctcgcaactcctttgagagtcgaagatatgcccagccgccaagcaattatacagacacgtgacttggtccttgtgtgcgtacacgtgaccacgggaacattcggcccggaggtctcaaccttgcatcctcgagaagcaagcactccgaacgtcgatatcacctcctcaatccaaacctctgcgtctctcctccctcctcgaggccattcctccagccaattgcacaatgatctccgctcgcttcgcccgcgctggcctgcgtgccacccagttctcggttcctcgcaccgccgccgttaacggaatcaggacctatgccaccccggcccaggatacccgcgcccccgtcgccctgttcggcgttgatggcacttacgcctctgctctggtatgcacctccattgcctcggtcttgtcgcgaccgtgtgcttcgccttttcgcgacgaacaccccgtctttccccgacccctcccacactcttcaaagcagtgttcagatcctcatcaaaacactgcaagcaaaaacccggaatgaattacccttctaaccatcctcgtgaatagtacaccgcttccgccaagtccgctgctctcgaccagactgcccgtgctatcgccaacctcggcgagaccctcaagggtgacaagaagctcgtcggcatcctcagctcccctatgctcaccgacgaggacaagaaggccatcgttgaggagctcttcaaggtcgccggtgctgacaaggccgacaaggccggtgtcgtcaagaacttcctccagactctctccgagcacaaccgtttcagctccctcgagggtgtctgcgagaagttcgctaccctgatgggcgcttaccacggcgagatcgacctccacatcaccagtgctcaggtacgtactccatgagctgtgtttcactcgcagaaaaaaaaataaggatataagctaaaagtttgtccgcaggagctcgatgccaagaccattaaccgtcttgagaaggccatttccaagtctcagttcagccagggcaagaagctcaaggttattaccaaggttcgttacaatcgatggaatttttttttgtagctatttactaactcattgaccaggtcaaccctgacatcgttggtggactcatcgttgagattgccgaccgcaccgtcgaccttagcgtttcttctaagatcgccaagatgaacaaggctctttccgatgctgtgtaaatgtaaattagcctcagtgtttgaggggatggttagattatagcatatcgtcccggatgaacggtagcgttcgtaggggaaaagggggattctaagattccactttctacctccattttgttttgttctcattacttcaattgcacagattcatctataaatgatgtcttatagatcgatgtttgcctgagtcctacaaggtacggtagacagcttgtctagtgggttgatcatttgactcaatctgtttaccttgatgtttgccgtccctttcgtatgtctggacccgaattgccggtctgatcgctggttaatctgcgcaatgacttttttatttctatatctgacttgtaggagtgcaagagcggtacgtgatacacccacaaggcgagcagctatgtcccttctatttgggagctcatgatatcattgacgtctacttcgctaccaaatgctctagagatcaagactatgctccgaaatgccatgtatgaatgggttggaaatgatagatagcaggagatgcaacacatgtgaaaaagggaagagtaagcacaaagaagatcgtgactgtcgtgtccagaagtaactaaataggtccagaagcaaccaaataggaaagcggccaggagagaagagaaagaagaaagacagatatcaaacgaggacgatcggaatgcaaaagttagacagcatccaaagccgaagagactgccccattctactaattatccctgtcaacctgcgtctcaaactcatcctcgtacgcagcaatcgaagcagagctgcgcactctctgcagctgactctccacatagtgattaacatgatcttgggcatcagcgtccgcagtactacccctgcgactgggcccacgactaggaccacaactctcaccatcatcatccaagacggtcgacgcagcgggtgtaacatcgccggagtagaagtcactccggttcccgatggagcgagtagtcgacgagcgacgaacagacggacggcccgagctgcgcggtcgtccagaacgggagaagatatcgtcgaagtagtgcgacgcggcggcgaagggcgaccgcggcgtctgcggtagacgacagttgataccggtgtcgtggatgatctttgcgatcagacctgtccatccgcactggtgcgatgtccccagcccgcggccgttgtcgccgtcgaagaactcgtggaaccagagattgtctttccagtgctcgtcgaaatcgaggaggtccgagccgccgtttacagcgcggcggccttcgtcgttgcgggcgaagaggtgctgcatgcggtgctgcagttcttctgctacgtggccgaggttcatgtagtcccctgaacccttgggacactcgacttttagggtgtctccgtagaacatgtggaagcggaggagggactcgacgaggaggaagttgacgcagagccagatcgggccacgccagttgctgttgccgccgaagagggaggagtcggagtcgccggggacgtagccgaccttgaaggtttggccgttgacgtccatggagtaggggtggtcttcgtggtacttggacatggagcggataccgtgcttggataggaactctgtttcgtcgagcattcgctccaggatcttgacgagacggtctttgctgacaagggccagtaggagtcggtcgtctttgccgcggcgcttcatgctggcgatgttgcgctcggctatgtctggtttgttctcgatgaaccagtccactcgccgcttgaacgaggggaatttattgatgagctcgggctctagggtgagaaccgcatacagcgggatcaaaccgacgagggacctaatgggtagctgctgggtccatggcccgccgtaggagatggcatcgtagtagaagctgtcatcttcgttccagagggactgcacggtgtcatcgcccgaacggaaggtcattgcatcactgatgagcaggaagtgctcgaaaaacttggatgcaatgtcttcgtaaatgcgacggtgcttagccagctccagggctatgttgagcatagtcagacagtagaaggccatccaaccagtactgtcagcttgctcaagcacaccaccagtgggcaacggctccgagcgattgaataggccgatgttatcgagtcccaaaaagccgccctcaaacacattcttgccaccggagtccttgcggttcacccaccaggtgaagttcagcagcagcttttggaacacacgttccaggaagtccagatcctgtcgtccgtacatcttccgctcaatcttgaacgtgcggaacacagcccatgcgtgtacgggagggttcacgtcgccgaagttccactcgtaggcaggcagctgaccgttcgggtgcatgtaccactcacgggtgagaagatcgagttgcttctttgcgaaatcgggatccatcatagccagtgggatacagtggaatgcagtatcccacgcagcgaagaatgggtactcccaagagtctggcatcgataagatgtcgtcgatgtacagatgacgccactgctcattgcgaatgccctttcggcccgccggaggaggaatttcacctgggtccccgttgctccattgatcccagatgaagttgtagtactgcttgcaccacatcattccggagaaagcttgacgctggatgttgcggagatcctcgctcatggggagagggttgaggtggtagtagaattcatccgcctcggtgcggcgctgttcaatcacatcgtccagaacttcttcgtcgacaaattcttcctttttacgggacactctgaaacgaacaacggcgcattcgccgggaggaactccctcgccgttgttgaaagcgtaccacgcagcgaacttggtaccttcgttgtctgggttgatagcgcctttctcttcgtcgacaatatgacgatggaatgcgtcttttacatagggggtggtgttctcggtaccccataagaacttgttgttagtctcgttctcggtgaacatcatctgaggcgtaatatcgtcatcgctagatccaactggaggtgatggcgcgaaggagacatatcgctcgccgattgcgctgtgcttcgatttggccaccatgggtccctctttcttgatagatggtttttcctttttcttctcgtcaccccagccccacgtgtttctaaaccagacatgggggacgatgtgtagatgagcaggctcggggccgcggttgtacgcgatgacacggaagagcaattcttcctcatcgtcggcctccttggcagtttcgatgaagatatcccagtagcgattgtcgtcgaagatgccagtatcaaggatctggtactccttctccaagcgtgagcgctttgcattctcatcgatgaggtcttggtaagggaactttctctgggggtatttgtagaggaatttcatgtaggagtgctatactccgggtcagcattctgagataacgggattgaatttaaagaagggtttaccgttggggtgttgtccacatggaaatgtgcctccttgacactctcaccatgattaccctgagggttcgacaaaccgaacaggcgttccttcaagaagtcgctgtgctctcgttagattccatgaccagacacggtcttcgaacggagtctagacttactcttcgccattccaaaacgcaaaggcaatattctgaatgccgtgcgtatctgatacaccagcaattccatcttcgccccagcggaaagttctcgatcttgcgtgatcgtgggtgaagtagctccaggcgtcaccgtcttcgctgtaatcctctctgactataccatggtaaagcggcattagcccgctgtttctcgatttggtatgatttgcagatctcacctgtggcccactgtctctccgcctataccaatagagcttttagcactgccaatctgtctgtttcaaagctatccaaggcctcgacttaccacatagggtccccagcgctgtcgaagtagttagcaggagtgttctcaagctagttccaagttagagagatgttaccttccaatacttggttctctcgcggtcttcctttaggcgcttctcttcctcggtaatgacctctttcccatcgattaagaccataatggcgattgcaaagcagtagccaagttaatgccaaacaaaaaaatatatgaaaatgaagacgaagagagggggggaagcaatcggccagaatggaggggagtcctgtcgaaggtgcagtctgtgccaacctgcggccctggagaaaatgacgtgaatcactgtcccaccggtccaccagtcgaggttcgggtggagaatcgggtcgcattagggaatgagggccgctgattggccgatatgactatgttcggttcgggcctggaaaggtgtgcaggtcatggacctcgcttttgcccgaaatagctacgagatcaattgactttggattagctatataaatagctataagctcttatgtctcgcttattctgcctttgcgtcgaatttgctacgttgtagtgctttacaacaaaactaccaaggtggaaaaagagtccatatctcaccccatataaggcggggaacaaatgaaagatcacaaatcatgatggtctggcgagaactgtgtcgatttggtgatacggagtggacggtgcccaaatatcggcccgattgttctagcgctgaacgttggcatcgggaatgtgttcttatcattttatagcgctgtagctgagacattcatgttacaactaagttgaggcgatatgtagcttgacatagcctggaataagcacagcatatgttataagcttggaagaaaaagaaaagaaatccagagtggattgcaatcaaatgaattgccaccaggcccactccctagatccacctcccatatctctaagacatatgtaccgagcacaacttgtatatccatctttaagcaggttgttttcatacggaactctcctaaggatcggtactatttctaatgcggcagagtctagaagaatcgaaacggttatagcaacctacacgctatagattctctggtgtaaagatgtagattatcctctagcaggctacacaggctacacaggctatctagaaaatggacctccgaagcgaaacccaaaaccataacaatcagggttgtctatattgtactgttgatgttcactatacctaacatccaaggaccttgcttcaaaaatcaagagagtaaccatagcgaagaatttaaatgaaacaatatattctcatgacatcctcgtcaaaccctaagttataggagcccggaaaggattagcttactgttgccaccatgcagagaatccgtaacaggtaaggaagcatataaaagccacaaaatcataccccgcagctctccaggagctgatagctccgtagcacatcaagtccgatcctcgaagtccgtgcctggtttctgcgcctcgaccagggaaacagggacaatgacggaatcgagtggatagttgggcgttcaatttctgactgcacgtctgtgattggacgccattggaagcccatcaacaagtcgcctgcttatcattcggctcgggcctggggttgcaggacaagtcccggaactatatctccagtgactccggagaggtacatcaccccagggtataaatatgcagatagtatctcgggtccgggaagtctgattgaaagaattcattttcaagcacaaaggcaaaaaaaaaaaaaaaaagacatgggtgaatcgcatcgccgtagcagtgcaaatgggggacgatcttgggaatattccaaggccatatccatacaataagggggtctctcaaaggatgctagaaaaaaaaaagataaaactaaaaacatcatccctataaaataaccacgccgactgggacatattgcgtctaccagacgcggcgcgagtccaatatcacggatcgtttgagatttccgccctgatgcgctcgtcccagccttaatctagtcccgactccaggaatccggtggcctatattttgaccgtccagatcttgataccgcagatgttcggaattcagttgtttctccgctgctcagactgctcagattcctcaaactgctcagacggttcagactgctccggctgctgctcgttgttggatccttcttgggaagctgttacacagtcagatcccgctacagcgcaaacccggccagctatatcaaaatcggcccgcaaaaaatcaagttgagcgctcaccagctgactggtcttgtccctggctggtttgggacgaagcgtggtcactccaggtagactgggactggaggcgcctctcggcctcgcggatgcgattctgcagctcttccaattcacgggtctggatcaacatctgttgtttccttggctttgaggttagcgccatgaaaatgagggtcgtgataacagcgagagtcgcgatatcgacgataaagggatgaacaagtgccactcacttctggctaatggtttgcgaaaggttgtcgacgtcagagtccagcatgaaggcgctgtccaaggccgtcgagaatgcttgcgccatggtcctgaggtcacggttaacactactatccgaagctccaacgacaatatagaggaacgaacgactgaggccgaaccttcggcttccactcgcgatccatgtcggacatcgtgtttgatgattcgacctccttggtttctgtgaacatagcgcgggtcccaacagctaaacggcgacagaggggtatgcgaccttgagacaggcgaggcaagagcaagttgcaggataaggtattaggcggtttaggtatcgtcgagaccaggaccgccaagaatcaagcacagatgaaaatgaatcgaggggtttgatgctgttcgaaaaacaaaacagggtcagtcctttatacttctcgacagataagccacaatccggtgggaaggtgaaagagataccagatatcaatagcagtcgcgatgcgatcgaagagtgataagcagagaactttggagccaggaagctaaaggggggaaaagaaggagagaagtgcgaaacgagagatgatcataagcccaccgactatgttactagtcgcggaaattggaggtcccatatatctccaccggcaaggagagagctcgtaagtgttacaactgtattacagggattctacgccattatgcgtcgtattttgatgatatataggggtttccaaggtttgtttcaggggttgactaactattttatacttccgtggtttacgtgtatggttcttctttcttagcattctgtctatagagagaaataggggttgatacagcatatgtatgtacttggttcacctttgaaacaggaaattggaaattaagaggcttcctttatagaaaaaggcaaactagcccctgacatgggtttcagggcaagggatcaggggactaggggactaggggattttcataccctcacttctacgggactcgaaagatataaggttgaaaacgtctatgctttcagatattagagaaaacattcagatctatagatttttagactaataacttatacacagcacgtcgtacgttgcataacttgcattctggcagattcctccctggcaactggtcacatgacctataccatacagtacagtagcatcgtgaatctcctcaatttcagtctccatttccatttccatcggcatttcaattctacaggggcatttcatctcgtcgcttcgtccatctgtaatccgacgtgttttatctgacccgttgtggtcgccgttgatttttttcccgctcaatttttcgcgcggatagattgaagggtcatgcgtattgcgtttctagcctgtcgcgttcgctatctctaaataccagccgacctagcccccaaagctcacagtgcagcgataccgagcactttccgtgaccaccctgatcgccgatcaccgaccaccgtggcccccatcctcaaagccttttcccccagtggccgaccggacgggcaatgggggatgcctcctctgtcggcatacacttcgtttgaatcccttctgtttttccagtccctagcgacttcggattcccgaccgacaagcttcggctcaatatcaaccttcttgcgaaacaaccagctcgtgcgcgagaatgtcgattttgatgccgatcgcctgaccccggaggcgctagaagacctctacgcgacattaatgcgcgacggatttagtcgtgatagtgcgccctcgctcaatggacgctccgcagatacctccagtccgcctagtccgaagaaacgcaagatctccagtccgcgatcagatggattggctgtcacccacaccacgctcgttccagagctagtggcacacctttacgacaaatacagggatctggtcaccaccgaaattagggacgatgagaaaaagtatacagaaatcagggctgagctggaacggctacagcaggaggacagcaaatcagccgctgcggcagctacagcattcacaccggtgcaaccggtgtctatcgaaggaaaggatgatgttctgaaggaagaggcgccgcgcccaaatgtacaggatcagacaggtcaacctcttgcgacgaccatcccgctcgaccaggagaaggcgaagcccgaaccacaacatatcccaacaaatgtgccctccacgacaaaggagcctccaacaatacaacccgcccctcttataaaccaatctcaagctccccttccccaagcgcaacccccgacacccaaaccgcaagacttagctgggcaagcatctcaaccgcagccgaccaccactgatcccataccaaaaccgtccatccaacctccacttgctccatctacccagaaaccccctccaaccacaccagccggtccgcgagtcacacctgcacacccgtcgcaaatcgctcctcgtgccaatcccgtcccacctgcaccaattgttacgggtaaggctggccctttgacgtcggcgtctcagcgaacccccgctcagccgagtttccagcagtggcagctagatccttctccccactcaccataccccgtcgtctccccaggtgctgctacacctcaagcagcccaggccattaccaagcgacctgtactaccactttccaccaacccgcctttgccagggtcacaagcccagactcccatccaacctcctgttccacaaacacccagtgccgtcccgtctacagctcacacacctgtcccaattggccgtccgcgtgtttcccaaacaccgagcgccacattcccatctttctctgaaacgcgcgcctctcatccacgcttgtcaattgacacacaaggctcctccacaccgtggaagagaactcctcgtccgaggatttcacgctctccaagctcaccgccacggccacggccggaggacgtcagtcccatcagcgaacgaggccaatcacctattgatgcgatggaaatgtcacctccgccgaagattaatctaggccaacgagctcaatctgcagaagataagaaaccacaacgcggccagtctgacatcaaacccgcccccataatcaagaccgagaaactaggtccaattcggaggacgcgcgccgtgagttcgggctcttctcggagtcgtgggcgatccatggcttcgcgcgatgggtctgctgcaccatcggaagagaccatgcgtgaaccacgagcgacgggccgccgaaagggtacagctgttaccgccgatgaagggacccccaaaccgcggacaaaacgtaaacgcggcgcaagtgaagcagtggaacttgagccccaccctgcggatatcccgagattcgacacgactcagtatgtcatggctacgcgcaacttccaccgaacagcggcaccgattatgaacgatgtagctacccacaagctcgcctccatatttgccaagccaattagcgagcgcgacgcccctggctaccatgatctcatctatcggccatctgacctcaagtcaatcaaatctgccattcaccagggcagcaaggctgtcgctactgcaggagaagcagccagcactccagctggggatggagagtctcccgctcctggtggcacaccgtctaaaagcggcgtgctcatgttgcagaagcatgaggatttcataccgcccaagggggttgtgaactctgcacaactggagaaagagttgattcgcatgttcgccaacgcgatcatgttcaaccccattccgcaacgaggattcgggcccgcctttcccatgtctagtgaccgtggttcgcgagagagtactcaagtggccgattccggtgaaggcggtatcattcacgactcgctggagatgtttgaggatgttcagcaggctgttacccgatggcgggccgctgaacgcactgctgatgaattggctaataagaatgtcctctcccttcggcgtggaagtcccagtgaacccaacaccgatagtactgatgatgtgaaagggtaattgatttggaacgccatcttgtattatgaactttgtatttgattaagatcagtttatttgatttgtgaatgaatgccatgatgtctttcgtcggtgccttcgatagcccggcggttattaatactcctgctctacgtgtatattctgagctcgtgataataaaaggaaacatatcaacatgtatatcattgtcataacctttcagcagaggccagccctgctgccctgagtctataatggggtatatatattctattttccaacagccgacctctaagcctgccccggcctcgtccgcccaagcccctcctttgcatagaagtccatcggatacacgcctttattccccgcctcccagtcctggcgcacccccagcgcaacaagcgcctcatacggcgtcagtagcggccgcgtaaacgcatatccccaatcaatactcaaccgcggacaagcaatctgcacccagcactccacatccgccatagatgccagcttcccagggaagatttcactcagcagcaagttaacgattggaatgccgcggtcgcgcaagtgtcgctcgatcatcgccatcgtgtgcgggttaccctgtcgaccaagcgaaccgaggataatgccccacttgcgcgcggtcttggctgtggcgattgcgtcgcggcggatcgtgtgcatctcctcgtgctcgtagctctcgcgcgtcagggtccgcgagtacggatcgtaccggtaggctgggatggaggggttgtggatcatggcggattcgaggtggaagcggccgtcgccgaggtagaggattgcgtcgatttcggtgtcggagagttgtggtgatgtacagccgaggatctcgcctttggagagcggggtgatttgtggaattatgacgcggaaaccggcgcgctctagcacgggtttcaggccgtggagtgtcgcgttaaattggatcgtgcccactgttgcgatcgactggccgggcttgaagttgcgctctagtgttgcgaggaggtgggttgtgtcgatgctgatgtctacgaagatgtagagcgttttgatctgcgttacgtcgacggggatcaggcaactgtgcgcgtagtgtactagcaggtcacagcctagggcgcgggcagtgtagtcgtcgatgcaacaggcgccgtatgtgacgtcgcccatgatgagggtttcgattccagggcagaactgggttaggatgtcggagatggttgtcgcgaagatgaggagtccctctgggaattggagggctactcgcttggcgcctgatgtgcggactcgatggattgtcttggggatctcgaatgagtagttcttggggagaagctcaattgcttcttggatctcgggatcgttcagaatctctggtggcacttggttgagggtgcggggtgtgcgtctgggagcggctggagggagtgggaattagtatgggtagttcagttgagctatagttcggtatatacctgtttgcaccgctgtggactcgacatctttctgactggtcgtatctttctgggcttgggcatctgctgttcgtcgtccgacaaatctcttctttggttgccgcatttggcttgctgcttgtgagccatcctcagtggagggcgaaggaatgcttggctccatggtattcagctgtaatattcgtcaaaagatatcaagaattagaggtttcactgatcttgataacaaatgttggaatcgatatcatcccacttcttttttttctgccgactgactcagcaggaggtggggtgatgtactagtccggaagtggtaaagcgctctccgcattctcggctcccacagttccatgatcccaagctcacccttttacctgccatttctcttacaattctggtttctgtggtcgtacaagttggcctgaacttcgttatgacgataacccgccccaggttgagtcttttctctgccctacgatctccatactctgcacgccgcttctcgaccgagtcgcgcttaacatcggaccatgtccgcatcgtggaggttggcgctcgggatggactgcagaatgagaaaaaaacaatttcaatgcaaacaaagcttgagttaatcgagcgactggctaagacaggtgtcaccaccattgaagctggctcatttgtgcccgcaaaatgggtaccccaggtatgacctcagcggagcatcatcgtgccattccagacgataaaaaccgatttgcttacgttacgacagatggctagcacagctgagatttgtgagcacctccttacaaaaccgcctcaagcacaatctacaattgcatacaattatcttgtccccaacatcagaggactggagaacctggtcaagatcctggatgacacaggagtctccgcggacgcgactggggagacctcaaagtcagcgacgactacagaggtgtctctttttgctgcagcaacggaagctttctctaaagctaacaccaactgctccattaccgagtcactggagcgcatcaagccgattgtcgcattggcaaggagcaagaatatccgggtacgcggatatgtctctgttgcactaggatgcccatatgaaggccccgatgtggatcctgtcaaggtggctgatattaccgccaccctactggagatgggagcggatgaggtctcagtggcggacacaacgggtatgggcaccgctcctcggaccatggagctcatgcaagccctcaaggctgctggcatcgctaacacagacttggcgttgcacttccatgatacctatggacaggctttggtgaacacaatcgtcggcctggagcatggtgtccgcattttcgacagcagtgtggctgggcttggtggttgcccgtattctaagggcgcgacagggaatgtggcgacggaggaccttgtgcacacgattcacagcctgggaatgcataccggggtcagcttagatgagatgtcgaaaatcggaggttggattagtgaggagctgggccgagctaatggcagcagggctggaaaagcgactctcgcccgtctcgcaacagaaaaagcgtcactttgataagttatcctatagtctgtgcttgtcatcgtccggtgtatttattagtttccaatgggtttcacatatttgccaacaccacacgtaaatatgctttgcattgtcagtctagccattttgttatgtacactgtagatgtgatcaaccagaaccaacacccacccctccatctccgttacggagacattatatccctaggcaagaaacaccaacgccaacatgatgcaaatctctggtcaagtcactcagaaatcagtgcagcgaccaccatagctccaatcaccagctgcgccccaccgtagaggctcattcttgggtccgccaatttcgccagtcttcgggttcttctcgccctcaaactcaggctgcagtccctttggcgcatcggggtgaagctcgccacctctgccgtccgcctgaatctcggtctgtggagactggttgacctgaggtgtgctgaatgcgccagtcgaacgtttctggagctgttcaaagatctcctgttcctccttcgggagacgcgggggagccggggagtctgagaagggcatgggcttgtcgtcgccactctggcgcaggaatcgagttgtggagagtggccgaattgcaccgcgggctgcggcagccgagaggactgaacggcgaataacgagagtataaaccatcgtgtttgtatatctgtgtatgcaaggaatgatatatccaatgaggcaagtctggagttgcacgatgcacaaagcacagggagatctcgggagctcggggtttgttgactcactccaccgatgtgactaagattgccgaccccgatatcgccattttttatttctcccggcatgtcgctgatccgatcagacggttctcttacgattctcactctctttggccgtagattagttttggtttctcttctattcttataaatcaaaagtttgccatgtctgccctccgtgtggccgcgcgccgtctgcctcgcgcatccaaattcgtccctgctttcgagtcaccagtacagcgtcgattcgcgactacggccactgcccctcaaaatgtgaaatctcaggtcaaggtatgtgtgataaaaagtatccaggacatcgttcggatttggagctgacaatcgcatagaaggaatcaactctgcccaaccccgacccgtcgccggactcagtcacggcgtccttcattaatgagcgggctcctttcatggtcccgacttatgttcgcccggctcctatgatgatgaagggccagggttgctacttgtgggatatggagaaccgacgttatctggacttgacggcggggattgcagtgaactctcttggtcactgtgacccggagatcgcgaaaattatcgcggagcaggtgcgagatgattttatggactgtatagcgatcaattgcttacaaaaagaccccaattacaggctgaaactcttatccacgcttcgaacctctatcacaacccttggactggtgctctgagtcaattgttgattgaattgactcaaaagtccggtgctatgcgcgatgcctcgcaggtcttcatctccaactccggaaccgaggcgaacgaggccgccatcaagttcgctcgcaagaccggccgcactctggacccttcaggtgaaaagcacgagtttgtgtccttcaacaactcgttccacggccgtacaatgggcgccctctcggccacccccaaccctaagtatcagactccgttcgcacctatgcttcccggatttaagtacggagattataaccagatcgaccagctccagactcttatcactgataagacatgcggtgttatcgttgagcctatccaaggcgagggcggtgtcaacattgctactcctgagttccttgccgctctccgcaagcgctgtgacgagactggcgctgtcttgatcttcgacgagattcagtgcggtctgtcccgtaccggtactttctgggcccacgctcaccccactctcgccccatcctctggcgaggctgctcaccccgatatcctgactaccgccaaggctcttggtaacggtattcctatcggtgccactattgtctctggcaagacagttggtcagcacatcaagaccggtgaccacggcaccaccttcggtggtaacccattggcttgccgcgtcgctcaccacatcgtcgagcgtctggctgacccggagctccagaagtcggtccaggccaagtccgatctctttgtttcgggcttccaggccatacagaagaagttcccaggtgtgatctccgaggtccgcgggcgcggcctgattctgggtgttcagctcaccccagagtacatagctaaggctggtgatattatcaatgctgcccgtgagcgtggcatgttgatcattactgctggtaacggttgcatccgatttgttcccgccctgacgatcaccgaagaccagatccaggctggcctgaatattttcgagcaggctgtggattcggttgtggccaagtcataagtgtcttgtctgaatgccggttaagattttgtttttccttttataccatcttgtattgcgttggatatgacaggacatattttcatcatataaactagagcaataaaggaaaagtgtcgtgtgtccaaggatttatgtggagaggctagccacgtgtaaggcggaaggcggtggatcggttggagataaggagtcgtcgtcactcttcgcgcttgattcgacgtgcctccgtattcattcttgtctgtttctcctgaatattcaattagaatcaatatggactgaatatcttttgtcactttgttgtagctttttctaaacttcccaacgcaacaaccgaatgcctctccctgtgtccgatgaggatgccgcaacgcttccaccccaagagcaatcatctcccttctggaaacgtttgagcgcccgtcttagtggtgccttcagcggtgcagaccctcgagtctgtgttgctttctggctcttcggtgcgcaccctaaaccagcccagttgattagctcaactatgaactaacacccataccggcaggccttatcaacaatgtcctatatgtgatcatcctctccgcagctgtagatttagtcggacccgatgtacctaaaggcgtcgttctcctcgcagacgtgatcccgtcatttgcgaccaaactcgtcgccccatacttcatccacctggtcccatattcgatccgcgtcctcgtcttcgccttcctgtcaactgtgggcatgctggtcgtggctatgagcccaggctataccgatgggggaacgatatcgtccaagattgctggaatcatcctggctagcctttcttgcggtgctggggagctgagctttgtgggtctcacgcacttttatggcccgttcagcctggcggcgtgggggagtggcactggtgccgctgggctggtcggggctggtgcttatgccgttgcaacttcggcgctgggtttctccgttcatgtcacattgttggtttcggcctgcttaccagccatcatgggtttgagcttctttgtcgtgctacccaggtcccccctaagatctgctgaatccgacgctgatagttatcgcgccgttgagggtgggggcccggtggaggaagatgaagtggacgatggcgctggtggagaagacgaggggctcttgggagtgtcgcacaactcccccgcccacaagtccatccatgtcaatcaaggtggttcctggcaggaccagacacgcatgaatctacgtcgtatcaagggactgttcattcccttgtaagtatccgggtctttcgatagtcccaaatctaggctaacaggtatctagcatgatcccgatgctactggtatatatcgccgagtacgtgatcaaccaaggtgtggctccaactctgctatttcctctgcgtgaatcgcccttcgaccacttccgctcgttctaccccacctataatgccatataccaagttggcgtcttcatatcccgctcctcgaccccattcttccgcatccacaagttgtacctgccatcactcctgcaggtggtcaaccttgtgttgctaaccctccatgctatgtttgattttatccccactgtatggcttgtgtttatcattgttttctgggagggccttctcggtggtgtggtatatgtcaatacctttgctgagattgccgaacgtgtgcctaaggaggaccgtgaattctcattaggagctaccactgtcagcgactccggcggtatctgcattgcgggctttctcagtatgggatgggaggtctggttgtgcagttggcaggttagccacgggcgtgattattgccgacgaaagatgtagaatagagtggaggtctgtaatgcacatatatccacagataatttgtcataaaatgatataaaagcacgaaacataggactgaaaccaaccggcctgaatcggtcagctgatgtcgtcactggcatgtgaaagtgggactttgttgacatgtgattcagcttcccccagggcttttctccaatgacgaggttgcattacttggacttcgctgctgattgatggcattatgtctttgttcactgtggctgacttgtctaaaattgtctctttgtcactagtctttggttctgtgactgttattattctttaaactcgagccttgcgttcttattctggcttcacatagactacacatacacatacacactaccggctgaactgggtagactgactagactcagccctaaccttgagaaatgataggtatgcaacatgtatcccactgcaaccaaccagactaatcgatgttcagaccatgttttggggaggccttcgacccgcttccgcaagatccaagtatttgcagtggtttccttctggtcggtttacttattaaggtacagcatataaagtcaacatctgtctaataaatcccaaatgctgaacgtcgaacagagcagatagacatggcccgccgtttattcgatcgctctcagcccgcctcacaggaaagttgacagcatggcagacaacagtgatcatattcctctggctctacctcagccggaacttcgccaagattgtcgggctagaatgtcctgaaccattggcaaacatgtactcgcggtccttcttccgagcaacatggataaccactggtttggatgctgggttttggaccgcgatgaacataaagtcaaaatggctccgagatatagcctcactagtattcacagcctactacctaatcgctgctgaacaagccgatgagaaggttcgccgggtccgtgctaccctgacattggagcacctgcgcgtgtcttggaataaacccaccaccccttacctgtggtcattggcaaaactgctacggccgcgaatgactcagttcccggctcgggcaattcgaattcctcgcccggcacagtctgtgtacaccgacccagtgaatgcatggctttatttcgatggtccgttgagtgcgctccgagatcagagtctcattgtgctggatgtacctggtggtgggtttgtggctatgagtcccagaaactcagaggacaagctattgtcttgggcgggacggctcaaggttcccgttctgagtatcgattataagaaggcaccggaattcgcatacccgtatgcgctgcatgaatgctacgatgtctaccatagcatcattgccacgaacggtcgttgtgtgggtctgagtggtagggctcgtcctaggatccttgtcactggcgagagcgccggtggcaacctggcagtgggcatgaccttgatggtgttgcagtctgcgatggctcagggctggcgtggggatgatgtgcttccggccccggatggtgtggttttgggataccctgcgttgaatatgaaggttgagagctggatgagcgatgagcagatgtcattgatccaggagaagagcacccgtcagacaaaccgcggtgttctgcaacggaaacaggatgaataccgtaaactcacaccattcacatcgccaggtcgttcggtcgaagatctaactgctatctcaccaccggagaaggcaaaggataacaaagaagccaatgtggccactgaagcggccagagcactggaaaagaaactccaaaagagcgaggacctagccccgaagcctgccgttaaagcagaagatgaagtcaaaccaataaagaccagactagccgtctcgtccatgattacctatgttcacgaccgcattctcacacctgagatgacacgtgcgatgatcattctctatattggaccccaccatcgccctgacttcaacaccgatttcctcctgtctcccgtcctggctccagatgctttacttgcccgcttcccgaaaacatatatcatgaccggagagcgagatcctctagtcgatgacacggtgatatttgcaggcagactgcgtcaagcaaagctgcatcacttccgtgagcgccaggacctagggttggagagggccaatcgccccttcaacgagcgaaactacgtcgagatctccctgatccccggtatttcacacggcttcatgcagatggctggcttcttccccgacgcgtggaagtatatccatcgcagtgcggactggctagaaagcctgttccaaattatcaagactaacaacttcgaggcggatttacttgatcctgaccgggatgcgagtattttgaatgccagtacttccctcaaatcaaacgccccaaaaagcggacgtaaccaccgtcgcaagttcactggcgagtcttcgggtgatgacgacagaccattagagatgagcatgagcaagaccacgcttgctagtggcgaggatgcatttgcatcaaagcctgaacaccgcactcgtcggaggagatcacgttcctctttcgcttcctcgcggattacagggtttacatcgctaggagatgaccgcaacgccaaggaggatttcatcgctaagctccgatgcttggaaagagcgggtcgttctgaccctttcgatccggacgagacaaatagtgcacctgaaagtccgagtatagttcgtccgagaagacggagcatcgcttcccttgatagtgaagaggatttgctggatcgtcgcatgaacgggctcgctggtgggttgatggggatcggggaaggggcacagactcccgggctgtgagaggacagggctacgatttatgattaatatctgcgtttattttcggtttagagtgggatcaagtatgtgttggaaatatataccttctacctgaatcggaagatgtatatgtagaacttcctcagattgtgtcaccgcatatgaaggaatcagatttgtttaaactagagcaattagggtgttcattcgagggtctcacttgtgtgagtagtttcttagggcatgattccctatttccataacagcccctctcggtggaaaggtgagatggttacatatcatgatctcgacaagaaactgctgcgatatggggaatgtaagaaatccttttaattcaggagggtcaaagacgcaaattgattttccccaggggcccattttctttcaagaaggcagctcgatcttccagaaacgctttgtatggcggttttaggacagtcttctcttcatcctcccatacttgatatccgacttcgtcccacacttttgactactcttgcagcagctgttcctcggcccaagctttttaagagaggtcagtgttcttcacgctgaacagtgaacagtttcactgacagaagtagtatgaggaattttggacgaatgcatccaacgtgccaatcatgtggattggtcttccgttcagcatgatctaccttgcttatataactactgatacattcgatgccgaagtggaacatctatcgcttcagatcgacccttctcgacagaagatcgtccagtgcctagtgctaggcgagtacactagagcaggaccgtacgtcttgcagacagtcattaactacgtctatgtcgagttttgtcttcgaaccgacgtggatcaagatacctggtatctgctggccttggaggtaaacctggccatgcggatgggctaccatcgcgatcccagtcatttcccaggtatttacccctttcagggagaatgcgtcgccgactgtgggcgacagtgctaatgggtgatatacttgtgtcaaaccaaatgggtatgccacacatgatctccgactggaaatgtgacacaatggaaccgcgaaatttgaatgacacggactttgacgaacagtccaccgatcttcctccgtcacgtcccttgaccaaatacacgaattccataggacttatcgcacgacgacgtatccttgcagcactggggatagtggccgatctcacagatgcagttaaaccatgtagttatgcagaggtgatgcgcgtcgacggcgtactccaagatgcggcagccagtattcctcccctcttgcagatgaagtccatggccactagtgtgacagattctctgcaggtcatcatttcgcgtttgttcttgggtcatatgatctacaaggggcagattgtgcttcaccgccggtttctatatacaagtccggacgatgcggattatgattcgatgagctactcgcggaaagcctgcttggccgcttcgctgggtatgctgaatatctaacatgtgcttgatgaggaaacatgtccaggtggtcagctctataccatgagatttcgagtggcttccattatgaaccaccagttcctcactgctactatggtactatgttcaattcttcatcgtgggaagacgatacagcgggaacaagatatacgggcggcccttcatctttctaggttcatttggatgcgaaagagttccacttccaaagagacaaagaaagcggccgagactgttagttttgtgctcgctacggccggcgacggtcgtaaacctgacctcgcttttaaccaagatatttcccacggtgtacaagacaatgatcaaacgaacgctttccagggaagttgtgccaaaggcacaggccaaaattcagacgaggaactactatttccagacaacatgagtttatttgagcgtaagtctcagataccaaacctcctctcttgaccgatctgaccaaagctgtagccgaccattttgttatgactagctcccttgggatgttcacgtcgcccgcccagcaaaatcaacactttggggttaattccaacggaatagagagcccatttgaggagtggatggtgatgaatctgcctcagccgtgatggccatagccgagactacattttggatccgacaactgacttacgagttttttcataatagaattatatagagactttggaatgaagatttcaataccgtgcggctttgaattacttttgagatatcatattaattcatttttacacactttttgaaccctttctgggatagttagtcgctacctatagaatgggataaaaagaaacaacggcttttgatataaaatacttgcgtagaagtgattcctcaactggctttacactatgaagccagataggctttcagcttacaggaaatacacatgagatgactcaatggcggaactacagcatcacttcggagattgtttactatgtctatatatgtacctgtatgtaccggattttaggccacggtcgcgaatttcccgattggggtgccgccgcttttatgagggcgctcaggctcctgctcactgagtatttcacagcacaggtgatcactgtgagcacttagggtatgcttagtaatgtaaaaaaatactgtttagtacttctcaaatatcgctcagtgagtgctcagtgagtgctcagggtatgctcagtgagcactcgggtttgctcagtcagcgcacagacatgctcatcttgatggcctgaaaataaaggcataaaatgatcagatgaaatcacgtgataggtggatcattcatcagccatctattctgtgcaggctagcgcccagcaattaaaaatctttaagcattgaccgtcctttttgttgattgcgtcctgcattagggaatgtattcatcaatatgaccaccgtaaaatgatgacgtatgaagatccatagctaattcaggtaccctatcctgactatggctaggatgactttcacgaggtatctagcatctagtcgggctataaatacagcgaaacccccccccaaagacaatcgattattagaactcactatttcctttcatccccttcattctccttccagcgtttccagcgtccctatccaatcatagattatgggcatgaagcggcagacttgcgatttagcaaaggaacggcgtcgcgcgagacgcaaagaaactgggttccaaccggacgcctaccgagaggatgatgccatacgtggtaaacataaacatactgacgagtccaaagcccttcatctgcagtacatcgagctctggatcgagtgagtagcctcgcaatgcttttccctcatttacttgtttattgacttttcaggtttttgattgaaagcggaagagtaactgatggttatgagctagaaaagggaattccggcgcccaaaattactgaaatcaaagaatttattcggtagtatgcgtattctactaaaaggcgtctcgacctagatagaaggcctatagtgaccactactttagcttacgccgagagacttttcggtagctttgagacagctataggaaatacagttactaaataggatcgctcagagacgtacagagttagtatagtccgttttgcgaaggctttaagtattaaggctgaccctatcacagtggatcagcggaactctaaccaaacaaaaagtcattataaaaaaggaaaaagaaaagttcaatttcataaagacggactatacctataccgtatcttcaatctagatggtcgataatcctatcttcatctatagaacaatgaaagtatttcttctattcgctctacagctttatatttttaccagtataagggttagagcattcattccgagaaataagcactagcaagagaggggtcttcgctataaggtatatccaaccctatctatatattctatctagctattaatacttaatagtacatagacctcgtcttatttcgttctacttcttctaacgaaccataggatattaggtagcgagtcaatgaatagtggctcaaaaaaatagaaacctagagtatactatataagttaataacctcattccctaaatatactactttatccttttattccacaaacgctaactcgccctatagctttagcataggtatctgtgatcatagcagaccttaattcgcattaggactgcttcttactagcattagcattaactaaggcatactttacagaatcaatacccttagagatttagcccaaatacggttactcgaagggaaggataaaatcaccctacgctggaggcatgatacgttagagaagcctatattccggaacgtgactgtacaggggatacaggatttgacgttaacaatagaaagattctgttactttcttcgccaaaacttcaggaaagcgaattatttcaaagttccgaaaattcatgatatctatcgagcgcttaggaataaagtcgatagtaaggccttctaattacctacaattcttaggataaaatctcacatttaataagtcgatacggcttagcattagtctcacaactatatagctataaagacggaaaaacctatgaaacgagctgtatagcccactgttcgtccattaatactatagcttatgtccttaacgaggagaaagacgatcgctattataagtaattctgtaaacctgatttacctggctacctagctgctaggattaaagaatctatcttagaaagtgataagcttactaaaataagaagccgtattggctcggcagatataactggtaacaaagacctagaaaagtacaagagactataatataggaaaacctatactcgcctccgcctttcagctcctacaaattaccggacctaatatgttcgtaacaggcaagattagagggttttatcaggagggcaaaaatcacctaacgagccagaaaggaatgcttgtacacgtgcccttgcgctcattatacccaaaattggtcgcctagcagcagtcatatcgcctatagacccgatgtcatttaataagaaactcctcttcataaaggacttgcagaagcagtattcgtgggactacaacgtaatatacttaccaaatgaaacacctgtcaatggaaaatgccctattgcaagctgccaaggagatgttcactcgtgagtaaagaatgtcatatgggatgattaatactgacttgcccagactggcgaactccagctgaagtagatatattcatgaatgcatccgcggctatgaagcttctcagtttagagttagcaagttggacataaagttctactacaaatgtatgcagtggtttcatacaaagcaccaatggcgagaacactgcaagcatcacctacgttgatctgtattaattgaaccatggacgaggctgttgattttgtagagagagtatctgagtactgaccaataatcatgaactgatttttagttgattgatctccgctgtttcaccaccattttactatgattggcccgatttttttgacagccgagcttatttgaacctcactgagttttttttcggtctcaatcttgaaagtgtatgagagatcagagaaaacatcagatttatttcattttcggttctatggatttttgtttttgcttttcttggttcgcgttccttcttttcccagaatcttggcggcctaagtagttgtttcctggagtgcggtggcggcgaggtgccgccgactaagagggcaacggtacttatttttctatgtgaaagctataccacattacgccatttccatcaactacctctggtagagaactcagcatcattcttcagaaatatccaattattagtttagtgagcaacatttctgtggatcgttatacgtctgaagagaacctgtggctattcggtcggattctctgctgtcacacccgttcaacgaagccaggtcaccacggaacctttacccgcgcatcgaaagttcattatgtcgaccagcaatgacggcatgcagacaaatatcctggttccggatgatgcggtaaccctacaaaactcggggctggtcagctctccttcgtccgatggaacacgtcgtattcataaacgacgtttaaaccgatctagcgatgaagaagaacagcatcttccgctgacccccgtatcgatctcctcaagctccgattcctttgtcagtatcccggatcatctcgtctctttggccgcactcgagcatctcggctataactcggaaactgcaactcttatctgggagtattggactaactggccacctggggagcctaagagggagactgatgacactgataatggtgtcctgtttattgacgtcgccgaaggtcaccttgattattctcccgatacctgctcagagaatgatgccgaatggttccactgtatgaatctatatgggatcactcgcgagcttcaggaggcaatcatggatcccaagttccgatcgatccgcctaaccgactcatgcaagtcctggattcgggacacctttcagttacgcaaccgagccctccaggcggtacaagaagcttcccgtgagcgagatatggctagtcgacgggaagcttcccgacctggacaaagtagttctggacggcgatcaatttcagattctttgagaatggttccttggctatcgcatgaaaccgctttatcggaagctgcaacaactgcagcttcaagagcaccgggccatacaaccatctacaagggaattgatcaagctcttatcacggaattattcgaccataatggcaacctagacttcggatgccttatctcccgatcacgttgtgatttctccggaagacaggacgatctctacttcgctattgaccgagaagtggccgaactgtatgcttgctatatcaagcaccgcagtacgtgcagcggggttgtcattattcatatcagtatcccgaactcggtcattgagtccctctctatacccgatatccaatttaactattggcccaacgcagaatggaagtcacttatctttcattgtcgacaggggaaaaagctcccctctaagctccggaagtacaaacttgctaagcttataattggaaccatttgtggcaagccaaaccttgttattagcaggatgcgatctccagatgaaatcacggagcacatggttctgaagactagcgatggacgcaacgcagtccagtacgtgttcaaaggggacgatggagatactttgttagaggagtgcagcagcgtaactgtgttccctttaacatcacgacagtttcaggcctggcttgagcgcgtctgagttactttggcggaataccaatacttgttccccaccacgaaatggcttatgtatttgttggactatcaattatcgagttgatttctaagcattttttactgttaatgtacctagtagtgtaagcctaggttaccggtctagccaatagttatctagcttaggtcgacgctagataggcctggtagaactagccttttgggtattctgagattagtagaaaagtttctaactgggaatacctataatatagggaccaagatagactacccttctggtccaagttggaggattcctaagggtaattctattcaccgcctcatttgctagccagagaagacgagtgatggactgatatgtgagtaacccgcataaagcaatgtaagggtataatgaatattatgacaacgccaatcacgctccatgttctatgaatacttttaccgggatgagtttataatgatgcacatgcttgattaatgcttctgatgtcttcattctcggggatgtacaaagtaacgttgctagttgacagaccgaaatctgtcggggccaatgcccacgacgatgatactaccaacctccttccgtccagcagaaagactaaaatacttttttttttctttcttccttcaatagccatcgtgaacttcctcacgtgccaacccatatcagatggttctgcttgtttccccaactcccgattaaagcaaaaagcaaagggtatccgcaggtccacattcccttccctgttacctcacaacgaggcactcctatcttcataagttagtttcaatgctttaatgaaaatgtactttgtagcttatgtaataatcatgtgatgctcagtgagcgggtttaacgattacgtaatactcaggggcgtgctcagctttactcagtgagcaaaaggcggcaagggggtgagcactaaaacggaaagggaaatccatctcgctcggcctaaaatccggtgtatatgtctctcgaaggcggaacatgtccctccgctctcgttaagtttggcagaataccagaaatccaaccctccaatcatcagcccctatcaggctccatggtggagaatgactgtagccaatcaaataacaagacgaagtatataggaacaacaaggacaggatgtatgtacatggccatgaccttatctgatccctagcacgtagaagggaaagaacgacacgccgccttccaccgtcgcgtcagacgtgctttgtttacttttcatcgtcccactgtctcctggtcttctctatctccatcccactcttttcgcttcagccgactttgaatcctgatcttttcccattgttttattctcaatcattaccacttcactctgcctacactcgggttgggttagcagctgcaactccaccgcccttttcagtctccgtatcaactacatttggccgattcttgacgcgcaacatggcagctggagtctgctactggagtggcaacggctcttattgctgcccttgtcttggccaaggacagtatgatgtgaatgacttatcgatatcttgccgggagtgtggacatccacttaagaatcatttccaaattgggcgtaagggatttcttctctctgccaaactgattctaattctctttaagcgcacccaagtgatgctagtgctagccaagttttgctaccgagacaccaaaccgtgaggaagcttgccaatcgcatcaatgaacaaagagtggtgcttgcccgtggaacgccctcgtcgggaaagacctttctcgcccggtctcttcatatttaccttcgtggacagggagtcaagtcgatttggatcgaacagtttccccctagtttagagggtggtcctaccgcgttgcattacctggtcgaggcctgtcacacccaaggctatgctgcattcggccacaacgttctgctcgacacgtttgtgtttatcattgatgatgcgcatatgacttacaataactctgagctgtgggtacttctgaattcagtgaaccagaaccgtctcgcgaacataccaggggccagtttctgtttgttcggtgcatttggcacccccgataggggtgttatgccacagaacatggggagtgacttgatagtattcaatgagcgtcagcgtcttttcttgtccactaggttttccgaggacctcacacttttctacacccgagaagaattcgatctctacctggaaatgcatttccaggctcgaggttctgattacgaaatttgtgagatcttgaaagataccatctttggcttaaccgacggccagcctgaattgatggatgcattcatgcatatctgtgacatggtatgtgatggtcagtaatgtctgatattttctgtcatgctaacatcttgccagtggtatgaggttctctacaaggatgacgcggatgacgaaatggaaaccataagctatgatgactatgaaatcatgcaattctttcaaattcgcggcatcatggaagcaacgatcgcggcaattgtcaacttcgcgggtcttccactttctcccgaaacctttttccctcccgaagcagagtttgaagttcttcgccaggttcggcaaagcggtgattacagcatttcgttcaacccacaaagtgaagctatgctgtcgtgtatcacgaaaggttggctgcacatagaacagagccgacaaggaggattcagatgttacttcccaacctactttcacaacaagtacgagacatgttattttcccaagcctggtatgcgtactaatattagaacagggtcgtggaatacctcatgggagtccaggatcttagatatcccaccccgcctactttggacagagcggaacttgagttgatgttgagcatgcgcaccatgacgatttcgtaaaggaagttggctcatgcaaatgccgagaacagcgttcgccagacgtggaactcacgctagatattcggtgatatcatctttctgagggggttgctaaatttgtgtctgtggatgatgagcgtgagttcgaggaatcctcttatgctgcatcgtcggtttgtgtccttttttaccatgttatcatgcgtaaaacgtaagtataatttgtggaaatactgcagcaattcaagttgattttaatttgggtatccctgtaactatcccctatgttgtaagatgtagaaattgagttatggcgactattgtagggcggtggacaaggcggtatgtagtatgtaaacggcggacctgtgaattactgtatcgggttagttttgccgttttgggtttagcgccccaatacgctgtcacgtaacctcccttcaatgccgctgacataaaagacccgtcttcgctgctcctcctccctttctctcacttttccattattctgcctctctatcttgcacttatcgccgccccctttcttttactccggcccctaccgactactgtacatttgctttcagcccgacgtactgcccctttcatttctaccggagatgccgcttaatccgacatccagcttgcaatgcctattacccagaagtgtaactactgggataatacagcatcctgttaattcgtgttaataatcctactccttccctagggcagtgactaagtaccatactacaaagatatctaggttaccctctgccagtacgccttttcgtctctgattccgcgggcctctaaatctgcaaagtgccagtataccctcgacgctgcatatccctctcccgccgccctacctgaggttgcattgcacagcccggctttatagaatagctcccagttgcctggctaaacgcccagttatcgttatcgtcggtctctccggtccctctctacctagtcggtgaaaacttgaaatcacagctcggtcatatgggccaatagcgaaaatgccgtacacgccctagaccttggtcgatactgtatcttgtgatcaatgcgagactgtaactgcgggaattgttgttataggctgtgaaactggtatagtctagcgtcctcgactgcaatgggttagatagtaggatctggttgagattatctactcctggtagaagaaggattctatcttccgggcctccgtcgtcattatctataaaagagactacaattccataaatatggtaaaactagaattcgaatcacctttaaatactcctcttcgcctgttcctattctctgccagtttttttttttgttttatgagtgcccatagtcactatatcctaaagagtctttagccgtctcttcacaatatatattaagtgtgagttttccctcgtgctttttttttcagccacggaattgcgtatattgcctcacctgactggacgctgatcctcacgctaagcagccctttagagacgattcctttgctatggccctcttctggcgaggtgtagcaaggcagaacgtggactttcgaatatgaaacgctttgatctaatgggagaaatgccgtatataccgtcggccttgcgcgtgactccttagtgatttccgttgtggatgggttggtggatcttcgtatcggcaggctgcgctttgtctcatgactcttgtcaatccaacctgctcaaaacgctcagaggaggcaggggacggtaggcaggtataaagggtcgttggaactcctcaaaccgagaaagaggctgactatctgtttatggttccttctcttctattctgatgtagggtctactatatatactgctgcagcgacaatcggatgttccaatcgttgttatgattttttggcccaatggctaaatcctcttatataattataacaaacgagatttccatacacacacacacacacacacaattcattaacgcccggcggctgagccgaaagggcaactatcgctaaactactatacatgtcatagtatatacaattctgtgactcattggagcccatacacaagaccttggcgtatttgtcattctcagcatgcagtgtcgcagcggatgctcgtgggttagtaagttggttagtagactggcttgaaggcgcttctccaagtgttcaacatcctatcttcggcagttgaagcgcgtccaccgtgaatagcacgaggtggttggtgggttagattagaatgaaagaggggtgatttatgttcgtcggcggggttaagtggcctcgaggcggcctgtggctatggcgaatcgtattgaggcccgtactgcctctaagtttggcgtccacttttgatcgtcggaaggcgacttccctcccaggtaaaagggcagatttcctcggtgagtgtcggtacattgtagcatatccgtccggtgtgtggtccacttccgacatcgaaagaggaagtgctccacagtttccttagcttgtccgcacgcacactgatccgtgtcggccgcgttgattcgatagaggtatccattcagtctcgccatgcccgtccggagttgggctagcacggtcgcttccttccatgacaagggatcatacagctgtcgcgtgtgttttcctgggagtgctgcatctactcgtttggcgtgctttccgacgtccgctggcagggtatttctggggactgcttgagaccgtgcgagattcagcgtggttgattttatcctcggggcgcgttcttgcaagagggcatcttcttgtgtcgcggctctagcctgttctttagccagacctagcagcttgttgtcttcactggcagaaacccagcggacttgaacatggtttccgtttctctgcaaccttttaatcaacttgtatatccgacacacgaactcctggccagattgttgtcgagggttcctgagtgtgagaaccgccgctttgttgcttgtgagcagtgcgatcgtgtagtctttcagtcccgtcgccgtgctcaatacatgtgccatggctgccagttccgcagagaatggattctgctctgcccttacagccaaggtgatggatagcgctttgtgtttaagcttccgattccgaggtggtcgcttctcgatggccactccaaaacccaccagctcgtttcgtgcagagctgctaaccgcgacctgcatgcacccgcccgcttcggccagggactcatgctgctcatcaatgtcggtttgtacgcgttccgcccacggggatagcgtgaaggggttgatcgtttctaatgtctccatgtcgatgtgcttgagcgtatcggctacgtgatacagtggtgagcggtggtatcttctgaactttctgatctgatctgtacaccggcgaagaggattggtttccggcaaggtgtggatgtctgtccacattttcacggctcgtttccaaaatcgacgttgtgcagtagccatgtgagcctccgcctctgcgacactagtcgcgactgtgagaaatgtccccacaatggcttgcgcgcctactctttggactcggttgatcggccccatggctttatccttgcacgcgtgcatccagacattggaggcgtagtccactactggtgctactgtcgatgcgaatagctgtcgcgcggttgctggggagaggcctcggagtcgccgaagctccatcgctgcttcgagacccttggacgctgctctcgcgatatgctccttgtacttaagtctcgtgtccatcaagacacccaggatcttaacgtggtctttgggtaccaccgtctgccccttgatggtgaatggctcatggtccaatttacgcatcttgggagcaaagtgtatgatagccgtcttgtcagcctcaaatgtcgctccgcttctcttttcccagttgagtgcctcgttgatgatggcttcaattccttcccggttactctgcgcagtcggaccggtcacccacgcggtaaaatcatccacgaaagcgactgctcctccctggctgtcgatctgtctttgcacgaggtctgcattgaaaaacagaaatagaatcggagacaggggcgagccctgcggcagcccagcttgtggcaagctttgagtctcagataactgcccgttgatcaggatatttgccgttcgttccgagcagaaggccccaacccaacgaagcaagacctccggtatgcctcgggctttcatcctctggatcagtcgttctttgcatactccgttgtaggctcccttgacatcgaagctaatcaagctcagcactcgtcggccgcgccacgccgcatagatctgctcctgcaggaacaccagtgcttgctctgcggaccgctgctttcgagccccaaagtggctcccccggcggcagtccatgcgtctccaccgcgtgcgagatcctctctgcgatcaccgattcgagtatctttccgagtgtcgcaaggagtgagataggtctccatgcctttgcaatggtgtagtcatctttattcggcttcttgagcggtatgatcttggcctgtctccactgtcttggcagtgtgccctcttgcagcgaggcttgaaagaggtcgaggaccctgtgcttgactgagggccacgtcatcttccaaacgatcgccggtaggccgtcttcaccaggtgccttccacgacttggccgctgacagttgccgctctatctcctccatagtgacggctggcatgtccacaggcgctctttgtggtctcactccttcctcgtcgatgttctctggcaaaggcgggaaaaacttggatatcaattcctccgcttgctccttgtgatcgttcgtagtggttccatcggctctgaggagctgcggaatcttcccgaacgcggcattgtctcccgacttgaggtacttggcggctttccagatgttgtcgttgtctgcgagaaactcgttccagtgcttcttcttttgtttgcgaatggcatcgtggtattgtttggccgcatcctgggccatcgtttcgagccgggggacttttcgccccgcccgtcgctcggagcgagcacggtttctccagtgcgtatatatatgacggagttgagtgaggtcagctgtccaccatcgcttcgcatgtggtgatggtttcgccctcggggttaaagcgtgtaccgcttcggacactgccaacatgagtcgatccgttttctgctgtaccgtgccctccgacggaaggatggctagagcgttctgaatcctggcgttaatctccttccatggtgcattcttcagtaaaagtcgctcttggtgctttgggcccgaccactgggcgtcgaacacggactcaatggcgcagtgatcagagccgtggtctgtctcgagtaaagcacattttgtcatggagtccgtcagattttctgaagctaggacgagatcgatggtagactcgcagtctccactttgtccgccgccgtgccatgtcttggtgccgcgtttaagcaagctactgagcgcaaactcattcataaggtcaatgatcggatccgcttccccttgtcttcccagcgacacctcgtctccaccccagagttgatcgtgtcggttgaagtcccctaccatcagaatctccaccacggcgcctgtctctcgtcgtacttttgtgatcgcatcgtgtaaatgattgcacgcatcgtccaaggctgagatattgcctccttcaacgtaaaccgatgccataaagatcagtcgctcggggagcctgaccatcgctgctgtgatgtctggagactccacagggacttgctccgcttcgacttctttgttgacccagagcatgctccgaatcgcccatctcccctccctccaggtagagggcaccatctttgtccacttgtgatgccccattggagtggtcaagagccggccttgaatcctcctcgcttggggttcctggatcgctagcgccaccgcgttttgagtgtcttcgtcattcattaaactctcgtgcactgcaccctgcttcctcacgttcagctgaattattcgaagagaattattcatgacgtgatggatagagcttccggcagttcttgctgtacgattcgtgaggccctccgcacggtacacactttggaaccggttggatacagtcgctgtggcgatggccctctgtagcgcatttcgcgcatttctgggcgttcttgcactggaatgccttatggcctatctcttggcagttgtaacattgtgtcggtcgcggtcggtgttcgaagacactagtcacaccagattctccccccgcgtggaaaaatccgtcggccaagagccttcgcgcgtcgatgcgtttggtcaggtaaaccaccattgaaccgtaggccttctcgctctcttttctgctcagccatgaaatcttggctacgttggtctcattctcctcactaaacgctgctgcagcctcggttcggacctcaccgctctcgtctagcacggaggtcttgttgacgctatcgactttgatcgggtagagctcgtcacggaggacccgagctcccgccccgattttctgttctgcaacctttttgaccagctgctgttcatcctcatcccggcaggcgatcctgatccggttggcgtttttcgggtcaacggtaacagcgcgacagcgccagtgcgcgtggccctctgttaactgtatctctgcctcaaccgctgctctgaccgagcctgcggaggtcgattttgtccctttttctgccatcttcgaggtatctatcgtgcaaaatagcgtgtccgtaaaggtggtgggtgtcgtgttcagcgttaaaagggaccgtatgttgcttgggtaactggacggcggagtgcgcgcgacatctgcgtaggaaggagagcctgcaacagcgggaacactgatttcctcgcgtaaggactggatttcgcgcaggatcgcatcgtggttgttctgagagcacgtctcagagtggcattgcggtgtcgtgtttctattcgtcagggactgtagctcgtgtcggacctccgcgagggcggtaccgaactgttctctggttctctgaatttcttccttgtgtatttcgtcacggagtctgatctctcgcctgagtttggcgatctctctcaccaaaccgccgacgtcgagctcttcgcgctcggtcgcggcgtcgtccgaagttacctcgtcacgccggtctcctagctcaattctctccttttgctgggaacgcgtctttcgtcgatcagtgtcaatttcctgctcacgagcgtagttgttcggtggtcgagtggtgcgtttcggtctcgccagtcgcggtggcgaatcttcgcgttcgtcacagtcgggcggttcaggggttcgcatcgcggcccgtcccgccattggtcacagtaactcactagacgcgctcgaaatcctgatgaaagtaccgagagacaagctacagtacttcccgaaactctttatactgtacgagctatacagtacgtctccgatttccatacagacgcgctcgaaatcagtttcatctctacactctctttaattctttactgaactttgttttgcataacgctatgcctaatatagctagattccccctgacccacacttttggcagtatcttagtacggtaatatataatggcataaaaatagctatcgtatcatggttgtatgggctatgcgtgtctagagccattcacttgcaaacaagccaaacagccgaggtggcaggagattcggtcggttatctggccacttctcacctccccctttagctaaccacgttcaatcgactattctacaaatatagtggacgagcgaagacatacgtagatacaatactggtaggacgaaatattttttaccaaccgacttacctgccctacaaatgctggattcctttagtccccttctgttgaacactggatgaccactatgtgctgaagttcggtttattaggaaattgaggacgatgattaaccacttctatcccaacggtgatgaatcccaaccccaggacctcgatccgtcggaccaggactcgcaatacgccccaactcctgggtattacgaacacacgccaccatcagaatatggatttagcccttcaccgaaccgttgcccccaggacggttccgagcccttactttcaattccaccagaaaccaataagctgcttcagctctccgagtgggaagcgaataggccagacgacgagcttcccgcaagctttattcggtatactatcgagtggaaagtcaaagtgaataatcggtccatatcagaggatacggagcaggacgtagcgttgaccccaagtgcttactggcccttggccctcagggacaagctgtataaggtaatcgaggagaaagttgcgcgtaaacgaagggtcaggtccgacgacacatccattgttgtgtcgatcaacgatcgcaagcaacacgacctgaaaaagcggtttaatggcctcaatattgactggtccgccgtggaaaaacaattactcgtttgggggaaattttataccagcggtaaagagttgcggctgaggataatcttcaactatatagaggacgaccactcccctagaagcgtaacaggcagaaccgacaaaagaggaaggtcatctgttaccaaaaggatgcttaacgagcgagatgaataactcgacgccgaatagcatacaactggggaacaatcgatctggcgggctgtctacaacttgatgcgttgcccttcgccgtcttgtcatcttggtccgcactgctggcaggacccacatgggaaaaaacactattaactaaggacacatcatttgaaacgcctgatcgcttatatcgaaggcggtggcattctggagtgtcaagatgatgtccctgacgctgttcacgaagaactcttcttagaagaacaacagaaattggaaagtctacaatctaagggcaacaaaattctcgcgccaggaaattgcccgcctatcaatatcaacttcatgggagggcaacctcacctacaatcgccggcgaccaactcaattccagcattagccacacctccaccgcaaaatggacagatagtagatcagctcataattgacgggccccgagatatggctgtaagggaatacaccgcgtggcaagaaacaaatgttgttgacgacaatttgaaggctcaatttcgacaggcatgcgatgtaacgctggccaacggtctggatcttgaacagatccatgaggaccataaccctgggttttttattgaaaaaggagttgcggtagggattgcacgccgcttcataagcgacatcgatagatgggtgaggcacgtaagaaactgattgcgcaggttcgcagtcagagtggctggcaaggcgtgattagacttggatttactcatttatttgctttcgattagatgtacttcctacaatgtagtcctaggcaagatcaatacgtaatgcatggattatctagtcaaacttgccaacgaaattgtcttatacagaactagtgttgatcttgtcagacaaaaatgggggcaccccgtttcatagatacgggtaacctgatatacgaggtgcagactattcaggtgctctaacagatctataatcagccccgacgctcaatgatagtcttcaacaacaacgccagcatggcgaaagtgacccattgcacttcgttctcgagatccgacaacctcgacacaccactcgaggaaagatacgaatccttagtcaggtctttgttcatatcgccgccaattacgcctaataaacgccttcaattcagagaaaaactcctcgataggattcaaatcgggtaaataaggtggcaggtaaaccaattttactcctacagtagcacatatttctttgattcgctcagaataatgaaaagatgcattatccatgactaaaacggactttggttcaggccactttccgcaatgtctgagaagctgctcaataaagtcctcaaaaacagatgcatcagtcgagccttagaatacccgagaaaaaacaacaccatcttgggcgtatacaggaaggatctgatatcgctggtcacgatggaatttggatacctgcaaaggggtcgcacctaccggagaccaaccggtccatctaaaactaattcgtttatcgcatccggactcatccatatagactaagtgataggattggaaatcagataggttgtgtaggtagaagtctcgcagatcggcgttttgctcctttgctctttgtcgagccacctttttcgaccagccgacagatgcaagagcccgcttgagactcgaatttgtcacctgaatatggaattcatcccataaaaagagcgccatctcgtccacgtacagcccaggcttctcaagaaggtgatcacaaacggcctctagcatcggaggggtgatacttcgtcatcgtccgacacgagttagaggcgctctgacatttccgaattggtgaagattattgcggatattgatgattgaacgctcactacactcagctgcttcggccatttgtgatatattcagggatttgctaagtatcatgtcatagatcatctcgagcttcgatggtaggagccttggcgccattttgcggagggacgatagaaggtgttgtgggtggaagccctataaggcattgactgatgggcaatgttgggcaccatgtggaattctccatgctcacccttgctcacccttctgctcagtaagcagatgaaatgacttttggtcggacgtctgggggatggtggggtattgggaaatgcacgtgaccctaagtctcgtagttcccaggagcatggttgtttctagaagaacgatttaaaaactgagggccctcaattattacaagctaggggcaaagtgacaataccttagaagtcattgatgctagatcgtgcgcttagtttctcctagctgattgactacaggatggatggatggatggatggatgatttcatttacccccgacccctcgcagagcgatacgcaggctacagcaactatatatatccgtatatgtacatgtatcgtgtcccacttcctgaaaacgaacttagagcctatcgtggcctagttgccgctcctgttgttaggctgccctcatggcgcgcgactttggaaccgttgtgacgcctctgcgaagtctagcacaaccgtgaccgtcctagcccgagagacggtgtctggcttacctctctcacaccatttgagcctcccggcagactcgacacgctgttaaatgcgtccccaccttctctcttaattctcttcttgatccctgtagtgttggacagtccaccaagacgtgggtgactgtttcttgcgcgacgcgcactgatcgtcgtcgcggaagccaatggccttcctgaaggtggataaccaattgtgtcccgtgcgtagctggtgtcagcttaactatgtacggttcgttccgccacgcactctcatgattcgccccctgcatttcctcttcgagtctggtgtgtcagggcttatggttcgccgtgcatgcatgcaatgcatctgcacgttttcctctttgtgattgcttcgatctttgttctaggcccctcttttactaggacgctctattgcttattgccatataccgcctcgacgatattattgtcagattagatagaccccgcacatctgctgacgagactgaagtctgctaccaatgctcaagattgcccttacgcaaaaattatccttgagaattagaatactcgttgaacaccttttacttagctcactgatacatcacctgcaacaaaatggagtgcctaggtgttcctattgaccatcgactgcggcgagtgattcgtgaggcaagacgtatcgatcgggacaaggaaaattccgaccatattcagcttcttcatagctttggatcatctctagaggttgacgagagtgactacccgatatgtgacctgagcttcggactcgaaatggcgcgaccagaattgaagggtggtgtccttattgtactggaacggcctcattcgaaacagaaaaactcggacggatttatggaaggcaaacgcaactgccgaaccattaatgcagtgtcggatcttatttctgctgtaaacaacgataagttgggttttgacgatgtcagcttatttgatgcaataccttttctagatgagacagtcgcgggaaaagatcaccaggatatcatcaatgaagcacagaatgttttcgccgatatggctagggctaaagaccctgatatcattctatgctgcttcaaaactgagactcaaaactctcttgtcaagaaacttcagagccgaggagtagggcggagtttctaccctgataacccaaagcttaccggatttggtttttcgtctacccttgtgaatgcatttcacccaagttacgctgttaactattatccaatatcctcttgcttcaagcaactcctggttctagagtttacgaaggcatttgctctttggaggcagagctggactgaagagccatggatgaaggggttaagagatgaatgccggatcagagcaaaaaggaaagtcggtggtaagaaagtctaacgtgatatactccaacactttctcattgcattatacagaaaagaatatcgacgggaaatggaaccgatcgtatatcaaagagcagtgggaagaacttcttacctccctggatgcacagtttgaaaaatgtttcttccaaaatcctaaagatatcggggcaggggatttgcagcgcaagcttgtggattcaaagatcacctggctatcttgcgatattgcatggattctcgaggaactaacccccgaagaaacaatcactttggaaatgccgcaacagttgttgtgcaagcttcgaagatggtgtcgtaaggcgtggccagaagaccaacttcgacgcaatccgagcaactctaatgggtactacgaccatttacccctcctgcttttaaagtcaaaccaaccgagcacacttgcaaaaagtctggagagcagactctttggcctccttcgcgatctgaacctctcttttaatcgattgcataacgatgtttatcataatttacttgcccagagatgtgcttttcgaaggtttgctgctgctttcgaggacatactagaagacattgcggacaatgatctttccctggaaggaaccgagcttcaccacgaaatgggcttcttaagtctgaatggaacagcagactaatctctctcgcaagtcacgaacaagagatgttgatggtgccatctctcgttctagcctttgggtccttcgtttcagggctgatgcgcgcaacgcgcacatctttcagttcaatacatttcggccattgaatttgagctaggtcaaatagagattagcgtgtttcgagagagggttctggaagaaatccgtgtgcgtaagtggtgaacctgatttcgatccaacctggacatggaggcgtcacagaggtttcgcagtcgtgcgccatgagggcagcctaacaatgggaacgccaattggccacgacaggccgtgacgaggctctaaggtcatgtcaggaagtggatcattctatgtgtacatactcggatatatagttgttgtatactgcatatcgctttggcgaggggtcagtgtaaatgatacctactactacctggacatggaaagctcgtccacggctaccactaccttaatttctccgcaacatctcttccatcaaaatgaagatttggcggtctgacaaaaaggatctcctatagcctattgctatatgctgggccggttggatgttagccacaatggtgttgtcgagggcgaaaagcatatggctagacaatatggcggtcacaaccagaatccactatagttcaaaagcttagcagtgttcaggaggaaccagaccgatccaacgaaccttgaacccggtgatggttctccctccctccttctccacctcctcggaggagctgtcatgcttctcactgagttgagagatcgagctaggagtgtgagaatccgccagagcagactggagctcggattcgcctttcagaacttcagtcattgcaactgatcaggcgctattgtccagatctatcgaggctgctctgcaaagaaatggattgcgagtgatctgatgggtctgctttttggattttttgggcacggttcgaattttataagagcagcgtggagctttaacaaaagcgatgtatgtactgaaaccatgaccactagtattgctaacacactatgggatgaaactggaccctggaatttacaatctgggattgcgatgggataccgctcaaacaaatgaaccggacgcgacgggatcccgctggatagcgacagttctttacgaaactcaatacgaagcaacaatgggatgcccctgggatagtgcaccgtccatacctgaatcccacacgctatcccagcaggggttccatcgccatcttactcttggcgacaacgacggcttatcccacggatcagggttcggagggctaattaaatagcattcaggctattgcaagcgaagctaaatggactccgtgatgtgagagtcagaataaatataccgtttacactctttagtatttgtctcccccaccataactgtccctttgcattccgcccgtctacaatctcgttgaaaatatacatctgcggttgacaaaaaacacctaccatcattatgaccatccaccgcattaccttgttcaacatccctaaaccggagaatatcgacatcctcttggctgaatatcgtcaactagctcatgaagcaaccagggtatgccttgaccgcctatccacattgacaaggtgtatgctgtcattttctctgactgacaatggcaagcgctacgttcgtgattgaaatacagaattcagagccttatattctctccgttcaagctggtcgtactttgcccgatgcacgaaccaagggctatacgctagctgtgaagacaactttccgcaatctggatgacatgagcttttacgattcgacctgtgaggcacacaaacgcctgaagtcggtggcagcacctcttagagagggtgatgtgttcactgcgtatttcgaagatgaggtggcattggcttgagtgtctatttttaagctttgagaaaatattatcgaggagatgccgataccttagatgaattgcttcaggattgtagtctatattataaggctgagttaacagacaagactgactttgggtagtagcttcgattattgtcaacgtcagaagtctcgatatctggcaagagtatcatgtcttgtaatttatatgccggctcaattcaactggacttttagtgttaactaggtgctatgttatcttttgcaccgttatttcaatttccatgcatgtatttgtacaagaaaagagagagatacactgcgtggagattatcctgaaaagtgtcatatccaatgaaattttgcatcacaaggctgcaaaagcggcgcagtttgagaaatccagttctcttcaatgttctcattgctatacgcggctgggttttccgcgagtcgcgcagccaagtccgaagtggcatgccagaactcacctttatctggcaatgcaaattgcagatctgtcagagacagaagacttttcccagggctgaaactgggcgcgtcttctaggagcttggggtcatggattcgggactgccggcacactctgtacaacgacaaacaaaatcgtttgacctcttcaataccgagccatataaatacgtcgggatcaactccaggcttgaactgagttaatatcgagggatagaagaacattttccgctttagacaggtgcgcacaagagcgacgagaagctgagagggtatttcaggcagagcgtgcgttaatcgcaggtctaaatggtcatggtagagaagaagagaaaaaatgagatgcaacaatattccttgatatattgccattggccagggactgggctcggacgagggcgtttcatcttgctgcaattgtgactcgtgatagtgatttgatatatcccatttttcctatcgcactctatatcaatatgagaaaaacagaggaaaggtaaaggtaagaatatataactgactctttgttcatagattgaggatgtgagtttgtgatggaggtcttttgcagtctgtcgcgcattgctttccccggtcgcccaaagtcccatcataatcactgattgcaaaagaaaagctggctcatgatcaggatcgaatgtagcagggtgtaaaaaaggccattttgggtgaaaattcttgaaataagcctcgacgtatggtacgtatggtacgattctacttgggcatttttcaatcgtttctgcacgctgaacagaacttggttctgccgcaggagagtagggataaccaggctctacagatgctactgagctcatgtggccatcagcgttctttgtttgtttcaattcacgtcgtgaattttgggtgtaggagcattgaattcctcgctggaaacaggtatcacagggtgtctgtccgttgcatcttgaccttcgcgagcggcagtagttgcaggcttggactgcacgggatgattgtaactccttatttctatggagcgtacggacatgctgacgcagcgtgtcattcctagcaaaaacgcgatcacaaaaagggcattcataagattgtgattggaagtggcttttggcatgtcgtgtaagatgttccttgcgtcgatagccaaggccacacccggggaaatgacattggaacgagggtggctgcggagtcatcggaactaattaggcgatggagacgacagagcgtgagggaatgaggtgagcaggatgggccgggaagatcttcctgcccaaacgtccgaaaatcgacaatggggtcgtccaggagtgagaactagcagccacgctgcaggtataagcgatatggaatgggatggcgacacgaggtgggacccccgatgggaggatgggataccgatgggataccgatgggataccgatgggagtagccctagatgggataggagggatggtgggatgatgggaggataggaggatgggaggatgggatagcggggcaaacctttgcacgtcaggattggcaacgtacaacatacaagggacgggactgaaggaaaaaatcccacttcttggtggatcttcccattccttcctccagaatcatccgaatcattcagtaacttcatctccaattcacatagtctctgattatttttttgcttttaggttttgtatccttctaggctgtcttttcttctcatccattataagcatacatcatcattccacacaagagcagccacatgctgaaatttccctcaatcacttgttctgagcccttcaacttctcttagcatcgctgcttctcggcacagagagctttctgactcgctctgtgtgctgcatggccaccccacccgcctcttcacttcctgttcctagtgcttcctcgagggaacggttttttccgaaaacaggtagtggatacgtcaggattttgagcttatgctgcaaaatatctccttctcatctggaacgacttcgaactcctttttcgtggctttccctttccatcacgcattccctttggtacgtatgctaaagccattgtcattcgagacagccagaaggcctccacattctggaatggttatctccagggatatcttgggaaccgcttgtttcaacgccccatgattggacagaagaacgctgaaacgagtgtatacggcgatgttagccttctctctcaagcaaaggagtttgcacacgagcatcaagttagcgtcaaagtggtgctccttgccggctgggctgtcaacttttcccgccatctgcagagcgatgatgtggccttttataccaaccttcgggattgcagctttgacacagaatatatcgttggtcctatggacgtgaccgctcctcttcgaattcaacctttggagaacgagtccacactcgaagctctctatagattggaaagcgaaaagagaactgtttctcaatcttcctatgtgggaggaagcgccatcagggagtacagccaaagccaagcctccctgacgtccatgttcactgttcgtgaatcagagatccccatgcacaaagttgaggccctcgatgttaccacagaaacaacactcaactggccaactggccaactctccctggtccatgactcgagttactcatcggcccgagccaagatcattttgcagcacttctgggaagtcctccagcagatcatctcgagtccatacgaccgattcaagagtttgagtctcacgtccgagcaagagaaaagctccctgttgagcttcaggtcttcccgtggaaacgtctcccctcaggtggggcataacctgattgagaaacaaactcgtgataatggagatgctccagctctacagtttcaacttagcgaattcatgagctttgctaagctgaatgctgctgcgaaccgtgtcgctcatcgtctcactgggttgatgtcgacagggaccatcgttccggttcacatggatgtatccgtccagttcgtgattgttctcctggctattctgaaggcgggaggtgcctatgtgattcttgatcacttccagccaccatctcgcaaagcatacattctcaacgatgtcaaagcaccattctacatgaaaaatgggggccctatcaaagggattgcagatgtgctggcttactcaattacggatctcatgcatggttccacccccgatgcggaaatcgatttgggcttatctctggaccctgagcagcctgcatatatcatttatacctcggggtctaccggtgttctcaagggcgtggtcttgagtcaccgcgcggcttccactgggatcctctgtgctccagatatatccaacaaccgcagcctgcttttctacaatcccatcttctcagcagcccagagaaccattctgtctactctagccaagggtggctgtctctgcctggcaagttgatcgacccttcaggggtctctgatgcgcttcatcaatgatatgaaagtcaacactcttggcattacatcctcaaccattgcgctgttagaacccgagaagatacccacgctgcagagaatcaacctcacgggtgaatcactagaccattccgttgttgcgcgctgggccagtcatgtggagctgaagaacaactacggtctcagtgaatgcacacagctcacctggggacgacgcatgttttcgggagaaaagctgtcgagtcaaaacgttggacagccattagacactacatctgcctatattatggaccccgatacctcgaacctaacaccattcctggttctaggagagctgtgtcttgaaggtccccagattgctagcggttatctgaatcgcaaagaagaaacggataaggcgtttgttgatagtcctttcactccggggcgcaactatatcggactggcgacatggcaattcgactggaagatggcactattgaaattgtcggccggattgacttccaaaccaagatcaacggtcagcgagtagagcctggtgagatctcggctcttcttcgtcagcaaagctcggttcgtgcagcagttgtagtggctgccactgttgagcaagaaaaggctctcgttgcttgcatttcgccgagtgatacatcactatcctggcctcgagttgtctccagcctccgaacagcgacattggctagtctcccatcctatatgacgcctgcatactggatgccattcgacgacctgccggtcaatagcaatggaaagacggatgtgctgcaacttaggaaccgaatccaagcgatgaagcgttccgatcttattggtgcctcgatggatacagaggaagttcaacgagaactctctaacatggaaaaagtgctccagctggcctgggctaaggttctttctcttccatctgaggttatcacaatcaatcagtcattcctggcgctgggaggtgactcactcaaggccttgcttgtcatttcggaattattgtcccacaactacctcgcagagcttggtgatatgcttcgcgcagactccttggctacagcagcgtcttccttgacatatcaagaaaatgcatccgcaaaccaggattcaccaacacctttcagcttgataccgggcgaaacggacgtggatcggacaacatttgaggacgcataccctgctacaccttcccaagaaggtatcatctcagcgcataacagtgcagggggatatgtgtatcatcgcgtgtttgacatcgaagggtacgacgtgtctcgacttcagcaagcgcttcagatggtgattaacaacaatgccatctatcgaactgggttcgtggcgcacggcacggggttcttgcagatggtccatcgacagtttgagctaccttgggacattgtcaatgatacagcttccatcgattcctatgtatcacaggttcggaagcaagagatggacatcgctcaacctcttgttcgtgcagccatcctgaatggtcacatcctcgtggtcatcatgcaccacgtgttgtttgatttctggtcatccaaagttctcgtccaagatgctgcagccatctataataatcagactgtggcttctcggttgtcattcaacattttcgtgcggcactatcagcagcaagtggatgagaaggcggcctcagatttctggtccgattacctccagaatacttctgctacacgtttgaccctattagagggactgctaatgttgtgatggcaatccaggtcaaccgccaacgacctatgattgatattaaaatgtgggtatgggattatgtcaatggcaagtcccacagatcccaccatattcaggtttcagaaagcgagacggatggagtcaacctgtccgggggtccactcgtcattcccttccatctcctattcctaagaatcctcaaaccccaagagaaaccaacgtggtaatcgatgaagaatcgttacagaagattgccgagtggggatgggatatgcaatttcagtaaggacttatgactgattttgaatgttaattcagtgtctcagccgcacatagatttcgttaaaagaagattggtgatggacgacagagagattcgtttcgaagagacaaccaccccttgccaaagctgattattatcgagcttgtaagattctttattggcttttgacctcggcgggaaattgtgacaggtgttccaggttccgggagagcatgttttgctgtagcatctatctgcctgacaagaaagacaagaaatctacagtcatcaaaccgtcctagtccgttgctcttaatggaagcttcgtccctcctaagcacttggtcttatgaatgatgcgacttcgatgatggtgagcattcgttgtgatgtgcaatcctcacgaggatgaagaaaaaataaatgtacttggcttttatccatgtttctgagtgtaaaattccctgtttctccatttatgtattccttaagccttgggacgctctgggatatccttttccttattagccccagggaagcgggaacctctatccttgaccttcttctccttcttctgtacaactggaggcgggtaggccttgagggtgatttcctgccattcgggcgaatctgcgtaggctttatgaataggtgccataagacgggtcaaagcctctgctgctgcaggctttagatcttggggagtcaactaggtgatgttagtaggtttccgggagcaagtaaaaatgttaacatacaacgtcgtttgtgtaatcatctttgagttgttggatgttagtgtagatgagaggttcgttatcccggcgtgccacgcggaattccttcttgccagcgagggcggctgcggggagcaagacgaactccaccatggcaattatgccattgttctcgacgactcgagggaccgcttccgatttacggatcttcttggcgactatctcaggtgggtcgaggagatcaatcttgctatctacatggggttagttttgaaccttttagacgggttctttacataccttcgatactagagctcattttacccccacttaggcctgcaaccattggagtgataagatgggcacgctaggagttgaaaatcattagcgacattcattaagccttgccccatggacatatcctttacctttcggtatccgagtttgggtagccattctgttgctgcggtgaagagcttcctctggtccaggccttttttttggttagaaatagtgtagatatgcaagtaggattagacataccgcctagttcggcatcgaccttaagatactcctcatcgaggacctgaaggatcgggtagagcaggccgctcattggggcgttggtagattgcttcacaatctctgcaccagccttcctacaatcatgctcagaggtcatagcggcaagccggtagacatccataacatagtcggaactccgctggtaagaactcccgagcacgaactcgagcttctccgtcgacacgcccacagcctctagaactgccgtgatgatcttttcgtagtatttgacacggttttccaccagttcgagaggcgctttcattgaatctagaaacgcgtgcacgtccgcaaggagaataaccacctcacatcctgacgctagtagctgggcgatcttgattgcggcgacgaaataaccggaatgaggccgaccagttgtagcagtgcctaaaaaaggacaagatatgtcagttcgccatattgaatggtagaaggtagggagtcattaccccagtacacacggggattgcgcccctcggcaaggatgctctcgatcagttccgggttaagaatctcgccgagattgtcccgaatgagatcaaatctttcctccgcagataaagccattgttagacagattgaagaatgggcaatactaataatgtaaggggaacagataaagaaaaagtcggtccaaaatcaccccgcaataaaatctgcagaataaggcggtcacacggggtgagtcaccatcacgtgactacgtaacatctgtacctgacccgatcaataactataggggattggtgaggctcttcaatacgaatatagtcaagttctattatctagctggtttatcttctgtcacacatttcattccctcttgacattttatctgcatacgtgcctcaataaatacagagaagagatttaattggtatctgcttgaaagtagtgaatatggctaatgtacagtctatggaattgggacttcttcaacgatcacgatcaagcctttgatatctaggtggccaaatttttacatcaaccacttcattcggcgccccacggtggaatctagggtaagggtagcctcgagtcgcgcccaaaccacagccaaagttgccacaaccagcaatacaccgaccataatgctagtattctcgtagcttcgcggaccgacacttttctcgtggtttccgcggatcagtgcacccgcaactggggttccaactaatgtcgctaatcctcgcaccatatacagcaaaccattgacactgacaaagttctgtacaccgaacaactctactaggctcgtcgggaaaagagcgacgtatgctgaagcaaaaacgccatagaagatcgtgaatgcaatgaacagtgtgctcccggtagattgtgtggcggatagacacgagggaagccataatgcgaggacagacactgctgagatgagggttgttaataccagtgtgttgagtcttcccatacggtcagctgcatgaccgatgacgatcttgcctagcgcatttgcagcattcgagatggcaatgaagtttgcagacgttgcctgtgagtagcctagtgtacgggcaaaagaagcgaaaaagaagactggcgtgtagtatgcagcggactgtaatgccgcacccagagcatgggcaacaaatttgcggctttgaacgacacgccagtccactaatggaaggcggaaaaatgtagaagaccgggaagaagcggcgttctcggcttgaatacgggtgatctgactagcaggccagcgtataaaggtccctgagccgcaaatgagtgcgaaggagatccccgccgtgacgcgaagtgtattgcggaatccgagggactcaatgaggtatcgaaaagcgaggggccaggcaacaccgccgatcccagttcccgcgaggattatgcccatggctagtccacggtgcagtgtgaaccaggtcggtgccacagttacagacggcatgtaagttagacacgtggccataccaagcagaatgccttgggtgaggatgaattgccacaggtgttgactgaagcttgcaaataataaggcgcttgaatgaattattccgctagcccagatgacatatcgagggggatattgctttgtccatgccgttgcgaatggcgcaccaattgtcatcagtgcgattgagagagtaccgataaggtcaatctgcgccggtgttgcgccggtgaacggggtgtttggctcctttgacatggagtcgtagagctcttgaaagacaccgaatgcgaagttaattccgcatcctgtaaagacgagggtcgtcgaggcgattataatgatgatggagtgtctgtagctgtgttagtccacctcttatggaggtggctgcggtacgtacagacgagttggtgagtttgccgggttttctccgtcaaccagcatgggtgttaaagaacgttccatccttggtagtagtataggtcgaatttttgatggcaacgggggtggacccgcgttgaaattgtaagagtgaagatgtatatgaggggtgacacgtaaggatgcacaaatgaagtaaaagagaaaaaagatgcatgtcttttgaaaaagaagttgattgttcttggcgtttaagcttatattaactgtgaacccggtttaaccctaacattctgagtcatcgcggggtatggccgaggctgtcggatttaatatggagagcactactgctgccatgaagataaacataactgtggcgacaggaagtgcagcagaagggtaaaaagacagtaatgtccgagtgaattcccattgaactggaaagcctgaaaatccggctcgggctatgatttagttcctgtttaggggtaaagaatggtacgtaatcgccgttagattcttaacaatatttatatagatcaacatcttaagccatttcatcctttaggaaattaccgcgttatcctttatgatgatagcaatgcgtcgcaatgagggcgaagcttccgtcaagaacagagcaacggactaggacggtttgctgactgtagattcgctgtcggacagattggaggcaacataaattcgtgtgtctaataaaagagtgtgttggctcttacatatggtctgttgtcgtattataaccgcattgaatcgtcccggcgtaatgaagccggtcgacatcctgggtagctgggcgagccatggctggaaaatagcaaaaaggatacataaataatccgcctaaagctgcgatggaaagctatggcaatgtcgttcgaattgcccaaaatgatagacagagaggatgcatttaccctattttacgataccatagcggcatcagacttggtagttcgagcaacatgattaaaaatgtcagatgagcgtatcaatccaattacgggttcgtagacaattgctcaatctttggctccatattcgcaatccaatatgtttttggtagaagacggtttcggaatttggaaatgccggcacactgtgctggacgacaagaggcggtagtgactttgtttcttcgtatcatgaagacaggagaagagagaaaggagtaagagaaaaggagaagggggggttaaaataaggaaagagaggtcagatgacattaaagaaatgaggaaagagcagaggtctatacggcaggccctctggatacaaacagaacagtcatcagtccctaaaatttgggcatttgccccatttatcatggggttgaggtgttagatgaagaggaagtaagtgcaatactgtataaacatccatgaccttcagtctctttcttcttttttcaaccacctgcctctcacctctgacttcttcatacaatctcataccgttctctcctttttcactgaacttcaccgtgatgtcgatctctgagagagaatgccaatgctgcgatggcaatcaaagtcaaccgccaatggcccacgattagtattgaaatgtgggtatgggattgtaaatggcatatcccacagatcccaccatattcaggtttcagaaagtgagaccgatgaagtcaaactgtccgggggtccacttgccatttccttccatgcgatttcagtagggactcacgactgattttgaacgttaatttgacgatttataacgatttgcatgctatttcatcacatgctcaagatcatttagttgctttgtttcctttattctacagtgctattttagatacgaatagtacttactttatactatatagagcaattattattatttcaaggatgctcttgtggggtgccaggtctatcagaagagaaagagggcatctcagcgaaataatcaagatggagagaaaaaggaagcaagtgtaagagtgatgcagccttgttatatagctgctaaccactttgcaaacgttgcagacctcgaacgtctcaatctatgaagaaagcatgcaaacagcatgagaatcatcgcgagtcaggtctaaagcaagtatactactggttcatactctctcattggatactaccttacctttatcaccaccttcatgagctatgtactaacttcttttatttggacaataagacgaccaggcattgatcttcgactatatgggtctttggtgtcttttatactggtttttgtactacttgttatatggttttcaaatcgaatatgataggcaagttatatgcagccctaaatgtatacaacttacgaggtacattccatggaaccttccaaccctggttccagggttccaatgcgagggtggatgactaagattatgcccggcaataatgtccaataggagagttatgcaccggttaatcgcccggaggttatcattcggcgagggctcccgatttaccccgcatattgtctgataagagataagcactatgttccgaggtccacatgtctcctgtctaatgttctcttgactttcaccagactcttctggtatttacctgctctttccatgacccccgatcgagaactaaatcagggtaccaagcgtaagcgcggggagcggagacgcgcctttctggcgtaagtacattgctgctcggcatcatttcgcttctcacattgacaatcctcaaaaagttgcgagacatgtagaaaacaaaaggagaaatgtgagggcggtccaccctgctggagatgtcagcgactagggcgaccgtgtcatttccaaggccagccgatccagatagcgacatccccctgctcctcaaccgtccccgtcgcgtccattccgaaagaccagagtcggcgaatacaaagcctggaggatatcgcccgtcattttcttggggatgtgcctctagatgaggagaatatcgtccgtatcgcggacaaattacgaagctcgacgaacaccgtcccgccggaaactgccctggatatcaacgagtcatttgacgttcagttcgtgtcagataatatggcacattactcgggagagttttctcactggaatttttcccagacattacgccgcaaaatgagctgccaaatagatcagtttgatttgagggtttgtatctctccccgcaaggactgaagcgtgtctaatgacgtacaaaaggttaaagaatactggcggccaacccagcttcaatccccaccagaagtgatagtggagacattgacacatttaccaccaagagctattgccgacttcctcatcaccatgtttttcaaatatgttgaggtcaactccttttacatggaacggaaatggattgaagagaaggtagcgctctgttacagtccgaaaactacatatacggccattgatttcccttgggtatgctctgtttttgttgtcatggccattggaactcaggtagcccacatggaggatgaaaaaccaaatcccgcttcggagatcaccgaagaactgaatttgtgctctgaagactctgtcgggctagtcttttatcatgcggcatgcaagctcattcctgatgttcttttggttgcttctcacgaaagtgtgcaggttttcttgcttctcgccacatattcattacctgtttcgacaggtggccttgcatatacctattacggtcttgcaatgaagatggcgattcaaaatgggatgcatcgcaaatatcaaggtggtaactgtgactccagaaccatcgaagtcagaaatcggttattttggacagcatacactattgaaaagtacgatattcaagagggcatttcacatcaaagctaatcaatgcttatagatatatcagcatcctccatggacgccctctgtcgattgcacgatcggaaataaacgcggatatgccaagagactgtcccacctttgagtcaccacgatttgccaacctaaccgcgttccatacactgatttcatacttgggagaggtctccgagacactgtaagtggctcaaaatgtgaaaccagttcatcggtgacatgctgatacctcaatagtgcacaatttaaaagatgtccgaaaaggcttctctctgaatatttagagcgactcgtacggctaaggacgagtatcaagcaatggtgggactcacttccagccactgaggaatgtcgagatctatgctcgcaaggcccgaatttccggcaaaactcgcatctccgactgtgttacctgcttatatatgtgtatatgggccgtgcattcatattcgttgatgacaggaaacaagcagatgaagctagggttggtccagatcaagatttaggacgggcgcatcggttagttttggtggacgactgcgtgtcgagtgctttggacattcttaacactctgcaatccttatccgaccacgttggtctttgccgcgcttcttacaatgaattcggtgcttgtcgtgcggctattctggtcattcttgcagaatgtctcaacgcaggaaagtgccagagacttcaagatggcctacaccgtggaatgagtctcatacgtcagatggtcggaggaagctcttcgaaatctgacatttcatatctcgaatctatcgaagcagctatcacccggctagaagccattccggaagaaggatccatttttcatccacaaagtgagaaaagctctatctctgcctattcgaagttcaaagactggacgcagtcactgaagaaggacaaatctgcaagtggaaatttggagctgtcttcttttagtccgctgtcgcatctcacacctagcacagaacctttcgtggacccggggctgaacgatatgacaactttctttgagtctcattggtctaatggtgatttccagtttgacgcttataatctttcatctctgtcaaattgattttatatggaggcaataaaactaagattctatgttactgcttcccttatccaaacaccgcatactgagcacgttttctccaagtcttctgcttgtcattttctggattccgctccgcatcttcggctgcaatagcattgataaggtcctgttcatcgaaggctctggcagggccaaaatccatgtcaaccggcttgactatcttcgttttaaaataccactgtcaaagtcagacatcttccatcgtcaaccaatttttaagctctcaccttatatgcgaagtaatcaaagacgaacaatggagctgcgagataagaagaaaagaagctcttcactgaacccttttctccaaatggccaacaagccaggtagaattcacacccaaagacaaaggccacaatgaggagactaaagtattgcgcccatggagtgagaagacctttgaacggaagtgcgctgagatccttgttttgagctcgaagtccttggcggaagcgaagatgagcaatataaatcgagccccattggaaaagcgtcgctattgccacctaaattcaagttgtcagcaacttcacatattaccccttttgccgatgtacttactaaggccgaaaaccaactatacaccaaagtgcccacactgttgcagttgagatagcctagcccaccaccaaggcccaaactgatcaagagggacacatagggccgaccctgtgagtcttttcttccgaagaacggatgaatgatctgcaggtcagctagtgctgtcaaacttcgacttgcgatataaacactagtaatgccacagctaatgacactaaggaagatgaacccgttgatggcgtgtgcgaggccataaacatccgcccgcttgactgcaatgacaaaggggcttcccatagtcccgctggcgttaacaagatccacgtcattggagggaacacacattccgacaagccagatattaaccacgaagaaggtaaacattctccagaaaactggtcgaacggtcttcttgatagtgcgacggggatcggctacctcgcccgctatcacagcgatatgctcgcctagcttgagttagtatattttcctcaattcgagctcggatctcataccgccgccgaaactaaaggccgcctgcacgaaagccttggaaatgccctttattccattattgaaagcaccggggttcttccagtatcggaactcgattggtccgtttgttgctgctattcctcccgatgtcatgatgaacatgaagaatatcatcaagataactgcaatacacttcacgaaggacatataatactcgatatagccgtagactcggacgtggaacatgtttgcgatggcaaagactaccagaaatatagtgataaatcccgcgagtggcacaacatctgtctgtggccagtatttcaggacggatatcgctgctgttatctctgctgggatgatcatcacccacttcatccgcgttagtacatacgaccttgatgttctagtaggctgacataccgcaaaccagaagttgacaccaatcgcaaagccgaatgccgggtccacatattcagcgcattgtcggataaaaccaccatgaataggcttatatgtagtcatctcgccgattgaagagtattgggcgtacacgatcatcctgcagaccgtgttagttacaagagtacaagagcagatttctctggagtaccctacgctgtaatcgtatacgtgattgctataccggcagggccggctatttattgtcaatatacatcttgaagggaatatcggggtttcaatgctcaccataatgcaatgcttgtccagttcccacccaaagaccagtaccgataccagcgccaaaggtcatcatcatgatctggcgcctggtcaaggaacggtgatacccagcatcgtccgacgcagatagaacgagagtgttgccatgacgctcagttcctgagctggctgagcgctcgatgtcatttgtctcgtttgtcttgagctcaaatgcgtccttcgaggtttgtattgaagattggttcatgctggtgcctgcgtgagtcgtagatgtgttttcagcaacgagaaacctaccatctgtcaatttatctgagatttctagggttagttcccgaggtcaactgtatccttatcgctatctctggtatctctttaaagtgtttacattcccggcgggagcaatttcgcacttcccgccggcactgcactgctagtgtctttagggctacggagtacatgtacatacgcgagtaataaccggacctttacctgtaattaccagtatgaggaggataatttgaattacgtacagttcaagcctcgaatcaaagcatgctatagatataagataggcttaactattcaatatcatcagatctagtgttttggattcctggaaaaagtatcccctttggattgcctcatcgatctgtcagttgcattgaattatgttcccaccttgtgcaattggaatctgatacgatggaacacaatcggaaattgagagtacaatgcctctttaaattcgtcgtctcgatcatgataatgataaaggttatacaccgcaatatcatatcactggggtgtcatacgtagaccagcttcatcgacagaacactcgtgaaagaaattgctgagacggttatagtaacggcctatgtactctttaggctcttgtgtagtaagcttgtagccgttggcccatgatgtagtttttagggtcggaggtatcaagaagagcctccagcagaacctgactgactcaatcaggggtgtcgcagagatcaaacgagctccccaggatgacaatggcagtctgtgtccgcaagaagatatacagcactaagcccgggagacagatccttgaataaactacaggggttgtcatctgattgacgcttgcagtgtgaaaggatgagtgagatgtagctgaatccatgtatcctcaaaggataaacacaatgctatatacacactgattgaatgacttccctagtgaaatttgatatatatctggatagtactggccaccaaaatctgggaatatataataatacaaccatcttattcgtaatgaactagtaattgtatgctaattaccaacagtttctaactaccagatactactaccaaagtacaatctacatctgtacatcgacaacctcacaatccgaccgcgtaaccggtgcggggtattatatgattcatagtttcataagtccgagataagttcaacaagggtgactcgctactatttatccaatctacgcccctgcctttctttatctgcttgaaagatcatttcgcttcaaaaaggtgctggggataacgattgatactccaaatccccaacaaacgactccaacattgagacccaaccatgtcctcatctaagcacgttgtcttcgacatcgttggtactcttgtctcatacgataatgttttcgacgccattgatacccgattgggagaccgattgcgcgcagagggaatcaagccccgtctgctgggatttacctggatggaagcagccgagcgcgaatacaccaatctaagtcttgcccaaagctacgtccccttcggtcaagtcttccgcaccctattctatcgtatgctctggatggctggcattgctgagccacggacctgggcttcccccgaagatctggagtatataatggcggaataccaacttctcaagttccgtccaggtgcggcagagtgtgttcagaagctgcgtgatgcaggctttaccgtgtgggcttttaccgcagctgatatcaagcgtgttgggggctatttcaagaacgcgggcgttgagctgcctgcggagaacttgctctcttgtgatgacgtcggtgtgggtaagcctgacttggcggcttatcgtcctttgctggagaagctgaagtcggagaatgatgggaagacgccttggtttgcggcggcgcatatgtgggatgtctctgcggcgaggaaggctgggtatgtgtctcgtctttgagttagaagttgctactggttattactgacactttattatacagatttaagggggcttactgctctgtatgggagaaggagtctctgtcagaactttttggagaaatggatgttttggacgagactttgccagggatggcagagaagatcattgcccaccaggcgtcatcttgaaggcttgcacttagtcttaattacatcaacctgaatagaatgcccttttgttaaacatatttgtcccgcgtatatttagaagttagaagtattaagccattataaaaagaagtatatagctacagtaaacattttccaacctcaactctcaacaaggttgattttaagttcacacttctcttttttatctcccactctaaactcgaatcattcaagtcaactcctcaaagtattattagataccgccggacaaagcgttatcactgtacgtccgatgttaagtagccgggtcaggaccgggaaagttaccggtggaaaagccgccgggagggaaacacctccccagtcctcaatgccaatgccaataaataattccgattcatttgtgtttcctagcctacttccaagcccgctaatagccttggactctccaaaatggaatcgaagcataccccagtcccaaatgggatgacgtcattctggcggacagagcctcactttctggacagccatcgatcaaccgaatctctccctcgggagtgtgatatcgtcgttgtaggagctggatatgcaggagcatctgttgtgcaccatattctcgaccaacttagccccgggtcgacgccgccttcgattgtgattctggaggctcgacaggcttgttccggtgccactggtcgaaatggtaagattggatagctaagagtgataaactttgctaaaatatttctgttctgcttattgtaggaggacacatgaagccggatgtttataatggtatcgctagcttggccgttgatcatggtgtcgaggctgctgctgaggttgccgctttcgaggctaagcatgtctcgtttctcaaggagttcgtcgaaagagaaaagatagactgtgaatacaccgtcacaaaggctatcgatgttcagttgtctcggagctatagcgcaacactcaagaaggcatacgatggattgatcgagaaggggtgtgaagcgaccacgaaggcaaaatatatccccagaaacgaggccgagaaggtgagcacattttcgaaatgtcatatttcgatatactgaccagctatccatcagttctctggagtcaaaggggcacaaggttgtttcacatatgacgccggtcacatttggccatacaaattcgtgctgcaccttctggaaaaagcaattgcggaaggtgtaaatttacagacgcacacacctgtatctggaattataaagtctactccctcaacatccagccatccttggacagtgaatactgcccgaggttctgttgccgccaagacagtggttctagcaacgaatgcctatacttcgtctctagccccgcaatataaggagaagattatccctgtccgaggaacatgcagccgaattgtcgtgcctcgaggttctaccgctcctcctctgacgaatacttacaccctgcgctggaacaattggaattacgactacctcatcccacgcgccgatgggagtatagtcgttggcggtgctcgcccggctttcatcgatgatctagacagctggtacaatgtcagtgatgacagcctggttcttgagcctgctgtccgatactgggataattatatgcagcggaactttgtcggttgggaaaatagccacgcttacacggacagggtctggacaggaagtacgttgctcaatctatgatttccctgcgtgtaccactgaactgactcaacttctctatagtcatgggctattcgtcggatggattaccgcatattggccttgtcccaggacagaaggatcagtacattatcgctgggttcacgggacatggaatgcctcaaattttcctggcggccgagggcttggcaaaaatggtactcaatgatatcgattttgcaaagactggactcccgcggctatttgagtctactcagtcccggcttgatagtcgccagaacaagatattcgatagcacccccggggctgggaaaccccaagcaagactgtgagcaggattcaaattttagatgcaccactactagcgatttaatgaggtacatatacacatgtctttgtattgcatgttagcataataaatagtggtggatttttattttttattccgtatagaaccttccaggtttaaataccagctacctgtaagcgaccactcggggtggtgacgcatacgggttatagtttgctgggagtagacgaaccaaagcctgtcctaatgtgacctaccgtagggggtagcctaggttctatactctatacaagcctttaggcattcgaacctacccagcttagtggctacgccgccgnnnnnnnnnnnnnnnnnnnnnnnnnnnnnnnnnnnnnnnnnnnnnnnnnnnnnnnnnnnnnnnnnnnnnnnnnnnnnnnnnnnnnnnnnnnnnnnnnnnnnnnnnnnnnnnnnnnnnnnnnnnnnnnnnnnnnagccttccgcccccccccccccccctcccccgggggggggtaggcggtaggggtagacttatttgcttatttacttacttgcttaaatgacctacagccggcttagtagctacgccgtggtttacttatttacttacttacttacttgctttcttaaatggcctatagccggcttagcggctacgccgcggtttaattatttaattatttaattggttgattgtttgcttggttaaagggtggctacgcaatcgccgccggtatatattacgtaatcatactatacagtcacgtgccagatgcataatgcatatatatcacgtgattagccctaccctagtcacgttactaccgaatttttgaccaatcagaagccatacatgagaatctgagattacgtaaatcgaagtaactaacgtaattcacatacgagccgccaccacatacgacccgccaccccattcaacaatnnnnnnnnnnnnnnnnnnnnnnnnnnnnnnnnnnnnnnnnnnnnnnnnnnnnnnnnnnnnnnnnnnnnnnnnnnnnnnnnnnnnnnnnnnnnnnnnnnnnnnnnnnnnnnnnnnnnnnnnnnnnnnnnnnnnnnnnnnnnnnnnnnnnnnnnnnnnnnnnnnnnnnnnnnnnnnnnnnnnnnnnnnnnnnnnnnnnnnnnnnnnnnnnnnnnnnnnnnnnnnnnnnnnnnnnnnnnnnnnnnnnnnnnnnnnnnnnnnnnnnnnnnnnnnnnnnnnnnnnnnnnnnnnnnnnnnnnnnnnnnnnnnnnnnnnnnnnnnnnnnnnnnnnnnnnnnnnnnnnnnnnnnnnnnnnnnnnnnnnnnnnnnnnnnnnnnnnnnnnnnnnnnnnnnnnnnnnnnnnnnnnnnnnnnnnnnnnnnnnnnnnnnnnnnnnnnnnnnnnnnnnnnnnnnnnnnnnnnnnnnnnnnnnnnnnnnnnnnnnnnnnnnnnnnnnnnnnnnnnnnnnnnnnnnnnnnnnnnnnnnnnnnnnnttcctactatatataataaagtcgatagtataaagagtttctaaagctagcgaagtctaattttatcagaagtccaactgtttagactaatttcaaaacgccaattatttagaaggccgttaaaccaagatttaataaagactttacctttaaaaatcatatatagaagaagcgcctaccctactgtatttatatattcaattacagtcacctactcgcgatttctaggttataaaagtaatctctaactataatattcacttctagttataacctttgctattacggttaatcctatagtaaaacctatcttattgaagttataaatatcgtccggatcgattctatactaaagaatggttttttgaactagatcaaaccactctctaataatccttaggtctttacatttcgcgcgctcgtaattataacgtcttaagaatcgggatataagggtagggtgctgtttaacaaaatgtataacctaattttggctaactgaaataaccggggtagttccgcgttgtttaagaagaagatccgccatttctcgtacgggttggtattcgaagataaatattcagttttgaaaggacccgatcaggtaaaaagggtactaaaccagctgctgagaagctgtttttaattatctctaatttaaaagctttaatttatacggtagggtatgcttcgagaaagtcgagtttattaatatagttaatcctgttctgtattttcgttttaattaaccgactatatatccgttttaagactataaaacagccgatattaagtagttgtaaaaggtaagaggaatacagtggtatacaaattggtataatatcgttttccttataaatttagtcgaattaaggggttaaatggcttctataaccattgagtactaaaagtcgataccttcctactatatataataaagtcgatagtataaagagtttctaaagctagnnnnnnnnnnnnnnnnnnnnnnnnnnnnnnnnnnnnnnnnnnnnnnnnnnnnnnnnnnnnnnnnnnnnnnnnnnnnnnnnnnnnnnnnnnnnnnnnnnnnnnnnnnnnnnnnnnnnnnnnnnnnnnnnnnnnnnnnnnnnnnnnnnnnnnnnnnnnnnnnnnnnnnnnnnnnnnnnnnnnnnnnnnnnnnnnaactaaatcaaaccactctccaataatccttgggtcttcacatttcgcgcgctcgtaattataacgtcttgagaatcgggatgcaagggtagggtgccgtttaacaaaatgtgtaacccaattttggccaactgaaataaccggggtggttccgcgttgtttaagaagaagatccgccatttctcgtaccatagagggccggggggccgatccacgagaatccatagagattatccattttcgaagagattcctcttcaattgcggtcaatttagtcaagttggcgcgagaagtcgcgcggtgttgtataccactgaggcggtcccgaagggttgaacgcggtacgttaaaagtgcgggcggtagtagaaatattggaaaattcttgattcttaaaagcctggatagctaataagatcctaccctctttctctattgaatctttagaggattgagagcgttttggtggcatggtgggtggttgaattaactaggtgctaattcatggacgcgtttttggatggggtggcgggtcgtatgtggtggcggctcgtatgtgaattacgttaactaagatgttggaaataaggtaatcaagtaccagcgtaccgatcaactcatccttcttgtgggtgctctaggatattttttatagcatacttttgacttaacattttaacgttcctcttcatgttatagaaaatatagtccagcgggattaggttagaacacctgccaacaaacggagtaaggactaagcaggataatgtttccctcgtttcaaacaccccatgggccttattctgccggctgggccattctgccaaatctcaccgtacagcttttcgccgccttgaaacctagggaccataagaaaaggcctatcacgtgatacgcacacgagcttcgctcccttttttacttgcgacacactccccgctaaactacttcgggtatatctcccgctggccgcagtttccaatcagctcgtgtaatttactatggtatccctagagtgattgtaaggtactgtcagccatgaagctatttagagattatctgatctatcgaacatgaagctattcggagatcacctcccttcgtaaagtttaatgatcgaaaaatacagcgcataacaaaaaccaaggttcctgtttaaggcctaggggggccatatcgcagtctgatattcaattcttaatgctcaaattctcattctctatactgaatctagcctagcagacaagatgagagcgatacaacaacccaaaggtcagctagagttacagactatggagatcatcctcgtatcctaatggaatgacattctgtaaaacccttgtcattctgtgtctcttgtcatccattctcctcgatcttctccgtctctcttctccgttgatttctctctgtggtatttattcattcttccttcattctttgttatgtctcaactggatgttttcctcaataggaaacacggtcaggatcttgccttatcctgcaaatcctcgcattgagagctgaccagttaaccaaatattgataatggccctccgaggtggctaaacaggactagatcaaatacagagggggcattaagagaaaagcgaaagcataaaaccaaccgacggagaaacagttcaactcagactatcaattcaaccctacgataaccgatcgccaatatctcagttttcaccttccatatgtgtatattttctcaagatgagaagatggagccgggcttacattgaccagcaatctcagggaatcagttcaaccctgggagggaagtactcgaacgattgccatggtatcgcctacatagcctttgtgaatctggatcgacgatatgagaggcttatacaatacttggagtgacttgagctttcaaatacacgcaattataacccatttccctctaacattagtgcatgcattctttatgtaacttccaagctcgttgttggaggagagtaggaacaagctgtaggccgaggcgaaaaaatgaactccagggctccttcctcgtcagggaacttttttctttatggctgaggtcacgttccaattcccattcattttactcttcccctcgactcctcttccctttcgactagatctaagcttctggaaccggtcatcactgtactcttgccactgtccaccgatcatcatcagtgcttcagttccatcgcatatgctgtttctctacttcttattggcttctgatcctctgacgaggttaggtctctttttcatctcacttctggccagcctgctgccgttcgaaatgagctcaaagctacctccccgccgcaccagggcggatcacaatggtaagctattatttccacagccccccgtgtaactgacatgagctgacttgagataaatcacacagccgaagagtggtgggcactgcttgagattcccaaaaccgaaaaggaatgggaagacgcagcctcaaatccatacattcccccgacgagcgctaagagcgaaacagaaaagtcaaagggcaaagagccagccaaaacgacagataagccacaaaaggcacccgatccgcgccatgggaagaggattagggacctacatgtccgagaaatgaaaggctgtctatccgcatctaagattggcctcccagaatacttaactggacgtatcttatggcataaagccgaaatcagcgacctcttcatcgacgagaaccagactcagacattgacagatgttcaaaaagggttgggattcgagaaggaagccagacagtttgctgcaaagtaccaagcgaagaatacagaattcaagaagtactataagcatattaagaagtatggcggttctctccgtaatgatgaacgccgttgtaccggtgagtacgccctcgtccgtgaccttcaactcaatatcattcaacggcccgacatcgaagatcaacacttgcgagagctttccgaaaaagctaggatctgcgagatgtgggcgaggtcgcaatgcaaaaggaaagtcgatttttcttgagaccacaatccgagcaaggtgacatggacatggaccggaatgatcaggagtctgatagacctgccaagaagcagaagaaatcagatgaagatggtagattgattctctacgcggatggacaattagtcaaccctcagaacaggaatgacatccattgtatcgtggaggtcaagtccaatctcctccggtccaaaactggctatgagaatttcctgcgccagatgggctgggagatgctgttttggattgcgaattgtcacaagctgaacctcatgaaaaaaccggtaagccgaaattccgcggcagctaatgcagaacgctaatcaaagatacagatggatcatgatggctgaatgtgctgatgaggtttacctggtcatcgccaggtttgaacagccgtggcttgactatatttccggagaagatccagaggacaatcagcctggtgacagctttctgcatctctatcttgcagggccgctgagtgtgtacaaccacaaacatgtcaagctcttcggaaagtttgtggtcactttcaccatgcagcaactgttggatgcgtcacgttgatcaagttacttcggcgcagaacattgtacccggcaagctttctcctcggctttctcctgttttcttctggggtttgtgccaagaacctcgatttctttatgaccgcaggagatttcatcgcgctgtttgagggtgcagggggtccacggctcagcggtccacgcgctagttcaacatcggccagtttccagcgtctcgactccggtcagtcgatcgttcagcggagatcaaccctccccgcgaaccgccacttcagtgagatttcggtgattgtcgggaacgagtcatgctcttgctcgcttgacagtccgtccgaactctctatcggtattgtacgcatctgatgactggtggggggatagctagactccgtcgccactacatagttgccccggacaatttcattgctctaagcttcccgttagcatcaattcgcttatcccaagtaaattaattatgtctttaacacttacactttcatcgtcaaaaataaaggcagaatacgcggccgactattcttgtggtttcaatttaaaatggagcaaaggcatatatcgattatgcagaaagcagcaacgtctctctcctcctaatgtcaatttgaaccacccagaccaaacataataatatggagccatcattgtagcaacatcaatgttcaccgtgtcataccctggcccatcacagctcattgccctcattttccatgttttttgatataatgggcaatgtgagagtctgaacggtgttcatctgtgccagaggccatgcccaagcaaccaaatcgctcatcaattcgccataccatgaatcattaacccattcccgatccaaaagatcgccgtaattatatttatctgtcgtgcaccattcaaagtctacggactcggtgaaatggactttcagtccattatcgtagtacccagatagtacacgggcacgagtgtgatcatcgaacgtgacaattgttgtctggctttccttagtattgaaatatgcaatatcagagggaatactcacggggaaaagatggtgcaactggatgttctcgtcctgcgatgtaccgacacgtcttttttgggagttcattgctttcaacattcgagtggctagcactaatagctcggtaatggatggtcggttctcatcagactcgtcaatcaacgccacagcccattgatggcattgaagaggattgtttctgtttcctgtgcgaacaattttgaaatcgtgatggttctcccgggattcgaaatcatagggcattggataactataaagactgtcagtgagcgatatgatttcgtttttcaagcattcccactgactgataaacattccattcatataccatccgggcttcctcggcctcatcgatctttctttgcctctctgcgatctgtctccaccactcttcctgtcgtttgcgccgctgtacttcatgctcttcactctccttgtcactttcctcgtcactatcccactcactacacatatcttcctcgctctcctcagaactctcatcaaccccttgaacgctgctgcgctctttttcgtcattattttgctcgcgcatctcttcgtcagcctctgtacttttttcatcctcttggtctttaggtaagtatcgattgagccatttgattgctgtttggtagtataagaaggccgacatcaggtaataagatggtagaggccggcgggtggaccataatccccattcccatcgccggctcacaaagggctcttctcggattttctcttgagtaggatctggaacatgttctgctccattaggtgcaaagtaaggagactcagaacctgtcttcagatccatttcagcgactgagatacctagatgctccatagtttcgtcagtaatggaagcaccttccatcttccgtagagccgcatggatgtctttcatatggtcatagctgtgattgaaacgccgaagcagtacttcagaaatagagaggtccatcattttcaatgagaattcaagatggtgtatcgttcaatcaagtagattggaagagaataagttaagggaagagagcaaaagaagactttatgtgcgaagggaatagtcgacgtgacgtcagaaagcataatggacacttgctcaaattggtttagtactatcgaattgtaccattggtcatgagaatataaaatgggttggtccgttctcgaaaatggcgccggagctcaagtgactagtactactggcccggacggttagttaactagcgaattccagacgaagcggtcatgtgataactataaaagcacccctggtgcacaaatccaattaccttcctttctactagtagtcatcccaagtgttgtcctctctagcaccctactattcccagtgaacaactttactttcaccctgtttcacaggcagggcggactgtcggcacccctgctgcctccgttgtagagttccctcttcactagctatatattgaaggtacaggtgagatagcgtggtatatagacaattttatcgtagctacaccaactaaagcgatgctatacctaagcctaagccttaaataggtaccttggtttttgttatggactggtggtaaaatgcgctctatattttccatcaaaccttccagatttcttagaaacatagtagttttccataccaatgaaatgaactgcttcactcagccagtgaagtgagagatctgtgcaatctaaggaaagcattatgtttcgtattaatctcgaaggccatggcatggctaatgaatagagtgatgttgaagatacgctgcttatgatgtttcagcagctgtgcttgtaatacctggcataccagatcggcagacaacattcctttatagttacatctgtagacagctttaggtttccagagacacaatgactgttcttctttttacagtgagatctttcacatatagggaacgagaactcagattatagccatcatctgacagtagaacaaaacatgtcaaacttcaaccctaaaaataaaagtaacagcagtctagctttcattttccgcagttacaattctgaagatttcatttgcgacatgtgggccaagaatgtcaagcgagccaatgctcatcatctccagcatcggcatatcaaaagagaatacttgcttaattaaagcgcgtagctcgagagatggccatggcgtcaatgacatcctgttccagaacaggcttgaagccactgcgctatatctcgcccatcataccctggtgctccgaaatacagccaacgtcttcgacggctcccatatcaaggattgcatcgtcgccagcgagaggaacacgccttgcttgatatccgagagacgcagacagctgcgaggtaacgacttcgaaaaagaggctctcagctgggtggttgtaggctgatccataagcgaagggaaagtagagttcgtacttcgagtaggtgtgttctgtggataggacatcggctaccacttataagatcaattgtagtcggggtagggggaattggtcttgctgaagcaccatcttttatggtccgagaaggacccaatgaagccatggaaaaatcaacaattctcaatattctgggccgagctgcaccgaaaatccgaatactagttaggaatagagcggaagtacgacgtatggagtggtaaatggaatagtattgtagataatctagaagtgaaacccccactacgaagcgtccttttggggggatttgatgcctggatgccttatcttagagcggcagaaattttaaatacctgaattaccataacagtagaaaatggccttatttctcggcatttgaagccgtctaccaacgcttaatctggccgccgctcgaagtatccctcgaggtaattcacacacccttacattcctattccgtcgctgaccctgttgttgtcgcagccgcaaaactaaagccagtccgtcgcaagcgtgctagatctctagctatgtactactcctgcacctcagcggagacggaggatttgatcccctctacctacctccctcccccggttttatgccgaggaagaaagaaggaagaagagaggagaaggagagaaaaccaacattaggggcttttatatatcaattcaagtagaactttttttggaactcaaaaaccacccagaaacatagagatggcgaaatttgtatgggcccaaaggcttcatctttttaaacttggaattaaattttacaatacattggaaagggcggtgtcgaaagcggtgctaaaataaggcaaccaggcaccaaatccccccaaaaaatgagttttgaaccctgagcgctatcggtcttcgtacccccactgcattagttataaaagcaccccagaggcggagatagcaacgcagacggtccgtacggagtagctagattatggaccatcattatcctccccaggacttctacagatactttgcgtaggattagaagttagaatcagtcgtttcgctctgcaacgactatctcgacggcctcagtattagacttctggcctagtgtgtatatttggaaaaggtgaatgtggctgtattgatgggtaacagcttcaagtaacagctacgatgttctcacaaacatagaatcacagagaaaggagttgtttattcgctagggaaagaagcagcatctcagtccttcatctcttcgtcctcaagttccagccgagccatttcctcaccctcaaattccaaccggatcatttcctcctcgtcccgggccaccgctgctctggcttccgccgccattactctgctttctgctgcctccatctctgcccgatgacgccgcattctggctgctaacagttgccgtcgtgctactctgctacccgggtttcgatacaactctgtgtgtgctgctgtcgcaggaggagttctagaacgaattggtggctgagtaagagtcggtggggaacgggatctggaccgagcagctggcggaggaagttgaacccgcgactgcaagtctgggaatggatttagtggagtcgataccacgctctgagcaaacgtccgaatggaagggtcatggccaagagaaccagagacactatcaacgtccatcatgttcgaaatcgaggtggcattgctggaagttgcagggcccgcttgttgctgagagtgaacaatgtgccgattgcccttggctgttagaagtcggagagtgccggcaaagaacttgttatgcttcgatcttctctcaatgttctgaatgacattctcaggccagaggcgcgcgtttcctacaacgacgatagctttctgagcccggctcaaagcgacattgagtctatgctggtcggcaatgaagcggacctcctcagcaacttcgctaggcttcgtcagcaggacaaccacgatgggcgcctcttggccctgcgccgcgtcgacagtcaaattatcgcgatataaacagccgcgctcggtctccgccaaagtggcggctacaaggttccgctgggctgtgtacgggctgatgatcatgacatcggacgggccaatttgctcgccttcggtggactggaaattgtacagattttccagcagagtctgcacggcttgtacctgcgccatgttcgaccacgatgtctcattcgccgggcggaaggcgacactgtccacggataggaacaagcgtcggctgccaggagcgacggtaggcatcgcatgcctggtccaagcatcccatgtccttcccactcgatccaagtggttgacgttgctgcctgaagcgagctttccactgtagattgccttgttgaacaactccaggatctgcggatgattccggtagttggtcacgagcgtctcctgggggtagcccgcttccatgagacgagacaggagggaccgcttcaggaactcggagccctcatttgcaccgtctgaaagaacagtcggaggcaactgccgggggtctccgatcagcacaatgacccgcattgattccattgtcattggaatcatactttctccctccatgctctgaccggcctcgtcagaaacattcacagatggtttgaagtctgaaaacttcaaacattcttgcgaggcatttgacagagttgttgctacgaccttgcttttagccaggaccgtacacacaatcttgccgtagaggctcttcagcttgatgacatcctggaggttgagtgggtggttatcactggtgtctcggtcacacagttcacgaagctcaacacactcaggatcattcggatgctcagcgatatggtcaaagaccagagagtgcatctggatcggttccatctcgagatccgactgacttatgatgggctgccgccgtagagtgggccgttgattctggctctcggctcggaccgccgacatgtggtatgatggcgtgcgaaagcgaacaacctgtccacaccaagatttcaggcgactatcccggttaagggcccggatcagagccagggtgaggttgtcaacgcctttgttagaggcagaagtgagtaacaccttgatctggagcgccatcatggcaagaactatggctaccgctgtggtcgtcttgcctgttccagggggaccatgaataaggcttacaccgaccgtgatggcggtagtagacttggtgaatgcctcttcttgtgttggatcgaggtggcagaagttccgaacatattggaggcgctctttggcaatttgggagggaagggaggagagcatctcgatggacaaaatgaagtagtcaggactggtaaagttaagctctgtgccatgtgcgaggatagtccgactaagtgagaatcccagtccatggttttcacccttgtcgccatatacgagcgttttggtacccgccgtagtcaatgccgcgatttgttgatcgattggaagggtatttggcttcgtggtcatcacaatctttcgctcactttcatcagtccagtcgaggtgaccatagtagtcaatgatgaaatcacctaacgtttcatcatcgacgactgtgcccttgtatcccttggccttgaaatcaccctcggtaacaggctcagctgctgatatctcgtctagcagtagaaagctgacggatgccattgctgtcagtgtcggaggccggccctcgcaattcaatttgacgtgaatgcggtgcctcataccgttgcctgatatggtagtgatgattgcgcggtgtcgagtgttcaggttgaacacactggttaccaaatcacgcgcaaaagccctctcaacgtagctggcttgaaccagtctgctctgccgatcgtggtcgttgaggaagtagggcccagggagttgccacacgatggaaggcttgactccgcttggatcctcaagccactttggcactactcgcggctcttgattggccggatgtttccggtagaaccagaaagcctgtgggggggcgagcgttgcgggatcaatgcttccatacggacgacgaagaaggctgttgagagtgacgggatcggtgtcgccaaatggcaggcgaagcaaatactccagcccagacattaacttccaccccttggaaaggaatctccaagctgggtcactccactgaccccagagaatcaagttgtcctggacaccaagaagcctttcccagtcctgaagagtagaagggctagcattctccggtgggaagccgatgacgactggcggcctgcgcatgtggactttgacaaggtatgccgtatcccaaactcgttttccatctgcgaagattcgcggcaaggaagctcgatactgacggaatgtttcagcatcgtccagttcaattccttcgcgggcaaagtggaagtcgcaatcctccgcggtaaagatcagaagcccgttgacacgtttgccaatgcagatctcgagtctgggctgctgtgattctagcactaggcgggacttcacgttgacgaagctatccccgaatgagatcacgctaggcttccattgtcgcaactcgttatcaccctgggtatcgtgacccataggctggtcaaatcctcgtgcaaatgcgttgaaatccattgctggtgattgtcaagaccctatgagagtagactatgttagccagttgatcgtgagtaaacgagcgaggagcacggaaaacagactgacctcgtcagaggatcagtgaagaggagcgaggagaggagcacagaaaacagactgacctcgtcagaggatcagtgaagaggagcgaggagagcagcacagaaaatagactgcccttgtcagaggatcaatcagtagtggaaaaatagaggagatggaggaaaattctctgcaggcaaatggttctgggagaatgtggagggtgaagatgtgaggaagataatgttgggaaaatcactcttgggatgggggtatgactacctaccttctacacgtgtctaggcacgtgaatatctcagcaattcgttaatcgatggatagctatgaggtgctcccattaccaacagactcacctgcatcaaagtgaacagatggcatggccaacgaacggctcaccaagaatgaaacaacaagcgaagacgtttcacgatatctctctaatgcagttctaggtaccttgtggccacatttccggaaagttgacttgggagatactgttctggattgcgagttgtcacgagaaaaactccatgaaaagccggtaagcagtaatcaatggatactaattcatgatatagatggatcaactatggcataggattttcctcagtcggcccattcttgcacatggtacggagcttgataaccagtcctagccatttcgttctgtcaatcaagccactcccctcgattctctcccacgttgccaaacagcgcctccaatatgtccgggacttcgattcaaaccaacaagatgatgcatttacaaagttggtcaataaagcgattcacaacggtcggcacactccaagcagcgcgaactagagcgagtcggaaaaacatgggatacttggaccaggagtaaaacatggaggtcgaggtattttcccctgtccacatcggcacctggcgctggcagtgaggttcaatggtcatcagcctcggttcattgcaaacaaagagagactgaacttctctttgagtctcgtcattgttcgcagcatgcctttagcccgagcatgtgatcaagaatatcgagggaagattgaattgcatcaagcctaattgtgtcgttctccgattgatcgcggccaagggcaatcgccaaattgttcactctcagttgcaagcgcccccggcaacctcgagcatttcctcatatttctgagctgatggacgctatcctacagttaggacagtggggattcgaccaatgacccagaagtttcaacccgttcgttcagagaatggtattgagcccaccaactcgcacccggtcgtcaattcgatctaaaactcgtacgagaacagcacacgcggagttgtatcgaaatccgcatagcagagaagcagaacgtcaactgttagtagttagaatggagcagagacggaggcagctaaagccagatcagtggctgcccggtatgaggagaaaatcagctggaactagaggacatggatcttgcagccaggacaattctttttcgcgtgcgataccatgttaatgaaaagatcatgtcacttttcctctgtcgttgaagctgttaccaatcaatgcagttacgttggttttctcacactagaccagaagtagaagtgggccttccggcagcaattttatacccggcccttgccaagtgctcctcgctcaacttacaatcacaggttgtcccccaaaggtggcaatattagatgtagacgatagcgttctgtgatagatcacatgctatgaaatatgaaagaaatcagggaatgtttgttgaattttagcgtcgagttttattttgcccctagttattctatgtacataaacctttcaaaatatagcgagtgaccttagaaggtgactatgcttagtcgggtagacgcgtcaagcggtgacgttgctccagaagtggtccagccttaggactaagagaatatcagctaaccccgcatgactcgcctgaagtcgtcattaatttttatctttctagatagtggcgatttcagtcgatccttcttcggatctcctccgtagaacgataagtggcattcaagcatagaagctcggccatttgttggtcgatggaatcaacggactaccaggtgtttacaaaagctgtacaagcatgacaaaataggtcagacatgtaacactgatatgatatattcttttgtttgctgtggttttgaatgccttcgagtgtcttttaagtgtcttatttgagctcctttttgagtgccttagtttatgtctttctattcctatttcttggtatagcactttagtcagaaaagggcgaaatgataacgctgcccaggtgtgatattcccacaccgtacggtcaagactgacgagccgtgccgacaaagttaaatgagcccggtcttggcgtcttggcgtcttggcagatgagaatgacatgctcttattgtgcaactgtcgggtatacgatgtatcacacaagtactttgtgcgaatggccttgttaccttctataaactcgtacctagcacagcttcttactgtagataatgtgcaacttaatctcaccttctccgacgatcatataaatgccatcgccaatcacaatggcgtgcttcacgcaattccccacacaattgcgcgatatcccctcatttaaggtgagtagggagtagttatacctcgagctttaatatttatatcatgcacctcgcacaattagcttctaatcacttgcattctgcaacctggttcgcctccttatacgagctagatcgcgcctaaggattttcaccctgaaagctcgctatggaagctatcaatgcatcggacgagaagactatggagctctcaaaggatttagaccttgaggccaacacacgattagaatacgacccatggcttctcgacgaccatcccctacgatcgtacccgacagagtgcatcccaggcctgtcactttacctcgacgaatactacgagtccattggaaagcgaagggcgcttctttttcgcgcgggatgccttatcctcggatgcctgtgagtgtttctgtcccatctctgctagacagccaatctgacacattcctccccagagtcgcattccaatgtctccgatggctcccaatccatatcacacgcacgggcccacaccacgcgcaccttcacccccagagtggcgcgtgtacatttccgacgctagacacgcgaccgcaggccctcgagtcgtcgttcaacgagggatgcgatggcctccggacggcggtctggatgcacaacggggagctgcagattggagacgccggtgtggagactgagcacgagcacgtcctgcagagactcggtctcgaccctcttatggagaaagttgctgagaacgatgccaccgcccgggcatccgttgatcctgggatgtcaggcagctttcatcctggtcgggctcggactttctttttggtgcttgaggctaggacctcgcttgacgaattgtacccgcgtctcgttgagcaactcgatactctccggcagagggggtatttgtcccattgggatgggcagaatgttgttccgcgccatttgactgtggtggttacgggggaggcattctctgggagtgactgtgtgcatcattcttattctgacgtgttctggtctttaccgggaccgtttatgattactaaggatggcctccatctctcgccggtatgtgtatagtagcgtaaccgttgttgactgtgatacccaatttgagtttaatttgatgtgcatgatatcattatatcatttccaggattgattatgtgctttaactgtgtacacatctatatctccactgcaaacagcgcaagatcacagcacagaggtccactttagcatcttctcagatctggatctaattcgattagagtaaatacctcacggctctaaatgaagcataaatacgtgcatagaaatggaactcccctttatccatcggctttgctccgtccaggtcccacccagaagaacaataccggtggtccacgtggggcctttcatttcctcatcgggactagcgggctcttctatggaaaattacagttttctttttgtatttcgcgtcttcgtctcgctttttaaatatccccagtctatacgccgtgtagaatttcaaatctacttaaaaaggagaaaataagtcgcaaaatgataaaagtagtcgctatctgccttcaaaatcaagaaatagattttattttctatttttaggtgcatgttattcctcgtcaccaaccggtttattaccggtttatcaccgacccggtagttaattgacgcatttcgatcggtgcagcgggtaattggcgcaggtaatctattcttttcgagacaagcgggaacatcgtcaaaaacaagcccgctaatccttgcccgttgtgttgtttttctcggtgggacctgtacctcgatggggctcccgtgggatgccggtgaggatccagcaagatgatccacggaaaagcaggaaacccgagatttgaagagttcacatccacagttgggtaccaattggccacccgattggacaagataaagaaaaaaaacaacgcacaacatggagaacccccccgagggaataaatacaatataccagcaggccctaagaacggcaatgccagcggttatcacgacgggcagacttgatatcgtcgacggtgcaacgagccaggcgtgtgcaggattcgcatggaccaggacaggtgccgaagcaccttattgacgaggttatcatatcctgaaactatgatccaccttgtacgccaattgaggagttcaatgaagatcctcgtggcgtaatgggggtggaaattgtcccttttgttcggtcatttcttcttcttcactctttttttttctctacttcgttccgttcgtctgacacctttcccacgttaacattgccgatcgtgcgggtcgaatcagagtcattatgagtgggggtcgtccgagggcgagagtaagtcggagcagaactatcagctaagaaaccaccatctaacaccgttccagtccgatgctctgccacagtcaccgaaccgcaaccgagccgccagcgatgcagattatacctcacctaggagaactacctcacccaggagaactacctcacctcggagaacttccgctgaggatggcggcgttcctcggcgattcaactcgaatacctcgacgacacaaagtaatggtagtgcactacccagtttgatcccgcgcaccacgcttgcgcagcgcacccagggcaaattcaccctcgctgggccggatggaaccccccagctgcgtctggcgcaggaacccttcgtccagccgggctacgcggatctcaatccatcctatgaacaggcctccaacgccagaccggtctggtcgctggccaaaccgttgccccgtgtggtgcggccgagtatggtgccgaccaaagatgagctcttgcagaacatggcgaatgcccagcggcccacggagaactcggataggttggggctggacgtggacccgaacgatgtcgagcagggtcgcattgataagacgtccgatccgcggaagatggctgcccaggtgaaggacgctcggttgcagcgtgagaatacctttatgagtaagattctcagtggggatggcggcagctccatgagacagacttcgcgcatgtcgcgttcgtcctcgatcccggggagacgtacctcgacatgggatatgccgccgccggatcaacaactgcccactgtagaagagggtgatcatccagccgaagatgaacatgaacaagaagagcggccgatgtccgctgacgagcagttccagaataatcaagacatgggtgcgcgattggacgaactcttatcgcttcccgaaatggaaaaggggaattaccccgaagacctgcatccgcttgtccaggaactggtcgaagacgaagtgcacaacaaccacaccacttggtccgtcgtccgtacacaccaccgcgaggctctcgccgagggcctgggtgtgtttgtttcgctcaccatgggcttcgccatcgacgtgtccgtcacagtcgccggccagggtaaccccaacacaaccgcctgggcctggggcttcgcaaccatgatcggcatttacatttccggtggtgtctccggtgcccatctcaacccagtcgtgaccatggtattgtggttcttccgtggtttccccgcccgcaaaatgcccgagtacttagccgcgcaattcatagccgccttttgcgcgggtctcgtcgcgtacggaatctactacgaatccatccagaactacctcctcaccaacgccgacaccggaatcatcaacagctttgtgacgaatccgcgagagtcgtgggtgagtcataccacagcgttcttcaccgagttcgtcgggaccagctttctaatcgtcaccattctggcgctgggtgatgaccagaacgctccccccggtgccggtatgaactcgctgatcgtcggcttggtcattacgtccctcctcatgtgtttcgcctaccagaccggcgcggcgttcaacccgagccgtgactttggtccgcggcttgcgctgctcgctttcggctacccgaactcgatgttcacggacccttactggttctatgggccgtgggtggggtgtgtcggaggtgggtttttcggtgcgttcctatacgacttcttcatcttcaccggtggtgaatctcccgtcaactacccgcttgagcgcacccagcgcgctttgacgaagagtgcaatgaggtggaggcgccgactgcgattgaaaccgaaacagtgagactgtccggtcgagtgtggaatattgtgtttttctatggcgtttgagcggtcactgtttttctccctgcattttgtaccagtatgtccggttaaagaggctaaacatatatcaaataatacccaaggcctagtggaataggatgtttttttcgcatttcatgtctgagcagggtcatcctggcgttttcctgcatatgcaagtttccggataacaaggaacaggtaatacaagacacaaactggtttgcagaataggcatgcaggttgggcatccgaatgaaaatagaactcgatttacttacatcattgagttattttaggtttgtcccttcctggggcccgtgacccggcttagtaatctggatggaccgtgggtcttccaaattggtatccaattcacgtgaatatctcgtctgttaaggttaagcatttgtgtcggtacctaggacactgccaaaccaagttctaacatcatgcctcaatcccgaggtactataactgatgtcggagtcccgcgctcaacctcgccccgcgcgcgaaggccactgcatgagcctactccctcgtaggggtctagggcgcaagcggctcattcctagtgagcccctttctttcaagagggcagctcgatcttccagatacgctttgtatgccggtttcgggatagtcttatctttgtcctcccatacttcatatctgacttcatcctatacttgaagttggcgagtaaattttgcgcttggtctaacgcttcgttttgatttcacaaattcagacgcatcaattggcgggatacgcagtttgcgcataggataggcgatgatgatcgttggcgagtgtgagatgctaaggtcatagtgaaccaggatcgtctctggcttgtcgtctgttacgggcttattatcaatagataacgaggacaacgaagaaggagcaggtgatgcaagtttgtcgatgaagtcgcaggtattactcatatgaataaagagatcttgcgttgatgagtctatagcctggatccatttatgatgatgcgctgcaactgtccttcttgacacccccgccttccccatcgggcatcagaaatagagatgattactttgacacgattcttcacatgtatttcggtgttccatgatgactcgagattgtgaaattgatggattgggcccgcctatagtttccttagtcatcagaacgtgccacctgaccctgtttatcgacgtttatgaatttacctggatctatataatcgaacatgggcttgagtaactatgtatgcaagttgtaactccagttctcggtttttcccactgagtagcctcttgatgctacttttagaagaaacactaccgctagcctgagtcggttcggtggcttaggtgcacttagtcatgactacctcatgagtctatggtggtgcacgcagcaccaggggtctaatgttactccatgttgctcaagaggttatccttgttatctttgtcgttaagaggctcattgtagctagttaatagaatcgatagacgtgggggcacttaactaccccatacaatagttattgtatacctaaaataaatagagggtctctaatatatatttgacacgttaagctctttatagggctagtatacattgggagcgcgttgggcttcttggcaagaacatacagaacaactagattattccagatatttaagcatcgagccaaatcctctaattatgtatttatatacgtgtatacaagatatatgtttaatgcaacacttccccccttttcccctctcatataggtgcatatgtaccctgccacacatctatgtcgatgtacacaatccccgcatgcaagattaggtcttggcccgaaggcccatcgcgctaaagaccaccgtcatcgctcaccgttttttctccgtttccccccatcaacttcggaagaaatttcaaaagtggattattctattttgattgtatttgtttgttgattgttgacacatttccgcccaaacgcctatttctgcacgttcccattgtcttgtgctatctcccgggtcgcgcgatcaaccgctgatcctgcagctctggcccatttccattttctcttttcttctgcatttcactattccaccgccattccactttcttatactttttgtccctcgatcttaatctagtcctccatcacattttgaacatggactatcgacgactacaacactcatacccgccacggccctcgcctttgggggcctcgcaagaacctcgcgatccacacttcaccgcgccttcgaccgagtctcgtcaagagattgacaagtctcgcccgtacccttcccccgcttcaaacgctacgtcctctccgtcacagctctaccagtcagcgacttcccatacatcgaatacccctcgtggagatacttccagcgcatactttccgaggaatggcccaacacaagcacaccgtcgacatgggagtctcgagacaaggaatcatgaacaaatgcatcgcaggaataattcgcaacctcaggctgctcgttatcgtgaaggtaggcaatctgtttggttttgtttttactttccctctgctcggatcccccagattgaggattccaaggatcggacttgtgccgtggttggtccgtcctccgcagccccgtttctgagtatgggcgaccgggggaatagtttccgtaatctcctgattcagatgctcaaaaccacgcgacacatcaaaactcattctccaaatcctccccctcttcccttgcccagacaccctgcccctgatggattttccccggtggcgcagatcgactggacgacagctcgggaacgctagtccaggtcgggtctagtgcacacagaggagcccctgcccctttcggactagcgtaggagcttccggagtcacgggttctcctcgctctggcccttgctttctctttgaaccattgctcactcattcacagggctcttaggtgcctccattatgaataatacgccatcacaacacgaaccagcgcgtctaaattcccaggggaacagtggaaatcctggatttcctggtaagcacccgactgaggcccgagagccgtgcaaccgtccttgtcgcgatacatgcatttcgtcacttatgcgaccgggacatgcgcggtcatcttgaattgactcgctgtatcaagggatatttggctaactcgaacccgtctgataggtccgaacgaacagcccgcaccatccgcgtttggaaatcgccaaatgccgcctccttcacccccacattcatattccgcgcgaccccaatcaacccacgcgcctgtgggctctttgatggcgcgcgatgtacctagcagtcaggcgctccgaccgggcagtagcatgtcgatttccgctatgttaggctcggacccagatcggtctgcgcgggaacctgcacgagaatctgcgccgttcttttcgcgaccacctgcatcgtcgatattcagtaacgcaccatcgtcatcttccgccgccatgtccccacccaacgccccaacaagaccatcaccgctcgaaaactctttcttccgtcgttcgaatacaccagagaagccattctccaagcctcaaggcgcccgtacctaccgatctgggtctggtgggggttcaactgtgggcggagagcagtcggtgttcgggggcttgacgcgctcatcgctctcacagtatcccgagaagccacactcgacgcacccttcacctagaatctccacggcagagccaccgtacaacgaacctcgtcgcatgagtctcaacggtccgatcactcggcccagtagtcagccaccccatgcagacgcacccacacggcccccgggctacagtccgatttcccagcccggaggggtcgcggatcgtcctttcgagtccggccctcggcctgcatctgggtcgtacgggagtcatgatccacagcatggtcggtttgcaaacatatttggcgagcggcgctcggaggatactgcacagcgagagcgagaacgcgctccagcgcatggatcagacgccaagttgacccagcctggatcataccggtatggctcccactacggcgaacgtgactcgctcgatcgtcaccagaacggctctacatgggacctcggtcgctctcaccctccgtcgccggagagtaagcgcttccctgcccccgagcccgggtcgagtttcgggtttggggccattcaaagctacactaaatcactggggtcgcaaccgggcggcagacaacctcgcctcacgcttcagtctctaaacagtcaaccaactcctccgccgcctcatgatccgtatctcaggcaccaagggcagcctccacgaatatcatcaacacctgctatcaccacatccacagctgccgcgtcatcgggtttagccgccctggctgatgagggacgccgcaaaggaagtgatgagctgctccatcatcgcagcctactggccgttggcgttgatgggaaacgcggtggccgtgcatcgccgcttccccaggctgtacaaggcgctcaagctccatacattggtcccgctggagagccagcgatcaagaatgaactagggcgagtcttctccggtattggcagcggcgtgggtggcgtcaccgcgactactggtggcagcgggccatcgacaccattaggctctagtcctttcaagcgcgatagcctcacgggccgctcaatgaatggagaagggatggatgaggcgtctaagcttgctcgaccatcctctgcagccggcagacggtcgaaaaagtcgcgcgacgaggagcagatggaaattgagtctaatgatgcccgaggcgtactatcagcacgtaacgcccgtcgttctcggcattcccaccaccatcaccatcagtatgttctacccaatcaatacagttgtcgtatgctaatattcctctagccatcaccaccatcgccacaaggcagacgaagaggcggctaccctgagctcccttcaacgttctagcttcttccatcgaacatccccagcggagtctcctgccgcacaccatcaccacccacattatcaccatcatcaccatcatgttcctcgactcactattccggttacatctcctatccgtgagcctcgtactaccgtgaacctggaaccgttgctttcgagtgtggcccatcttcctcggcaccaccttggctcaacgctatacacgccacgcatcagtacccccaccgccaagtcgtctttagatagctccaagtttggatatacatcgaccccccagccccttccccgcttcgaacagcgagagaattgcacatttaccgttcgagtcccccgtttccgaatcaatcaatctcaccgagaggaaatctgcgcccgacgcgcgctctgggggactggtgtttatacagacgactccgaccctgtcgccgctgccatccactccggcttcattcgcggtgcgtggggcgacgacgtggacgagtcaatgcttgatctcgagattagagatacctaccagcacgcaccgccacccgaaaccacccctgagggcgaggctccggccaagggcccacgtctaccaccgatacccccaaccgacaaggacctgcacatcaccctactaattcttccccgcctggcccagtacgacagcactctcatgttcgggctgaagtcccgcaaatgggacggtcgtcacgatggcatgagcttcaagatccatgccgtggactgggtggacgagggcgttgctcgtggcgaagagcgcagcggcgaggcccgtcggaaacgtctccgcacgcttatgcagaccggtcggatctgcaccgggcctgccatggctaaaatggatgagctacgtcgtagcggggtgcaggtacctcgcgccatcgatggccaggatcaaccggcagctgtgcagcccgtctcctaattgcgcaccacgtattggctgaatgacttttgactttttatttccttttccccgtggagcctagtcggtgttctgggtattccaaggtgttggctatttttcttgtcattttcctcttcgattttgttttgttttattggccgggtcaacgggatcggatgaaagggggtttccttgatttattcttcccatctatacataatctagcgctttatttctttcttactgcaatgcgcctgtcatatactccatatatcgtattccgtacctttacgctaaaagctctccccgcattggaggggatctcccggagaaccggagtattaaagtcggggcattttatattttgtgtatgttttatatgttgtataactatcttttatacaatcccttccattcaacactatattagtgcccttcacattctacatatttctccagtgccccagctctcccttgtgactgtaactggggaaatggaccgaggctcgtgggtggagcaggtattggtattaccgtattatatcctttgccccaggttcagatgcatatacaagtccatagtcaacacgataataagagccaatattgaagataaaagacatcaagaaaccaattatccagatctccaattcacaattcacctcttcaccttctcatcgttccccgtggcaaagaaatccaagtcgatcgggactgaggtcatgtatttccccagtccccgtaccgcgttttaccggcttccccgccagccgaggtttctgctttaagcgtcattcggccattctttttattctcccttaagcttcacctggacgtccactcctccgaatacccccaaacgaacctttcagtcaaccagagggatgttcactgcttctgcccgaagccgtctttctaacctgtcaaggcaacgcgttccgaacactctgctcgcccgctcggtaagtcggttacatatgctgtggaatgctgcggaaagcagtgaaatcgcccgggatcaacccattgacacgcatatagactctcaaaatggctccccgacgagcagcatcttccgtccctgagggttagtaacacagacgtccggcgcgacgtgggcacaccggatcaaacgctgacagaacagcaggatacaaggaggacctctccaagggcaagatgcttcgtttcgaagactccctccccagactccccgttccctccctagaagagaccagccgtcgatacctcaagtccgtccacgctgtcgtctccgagtccgagtatgagcgcaccaagaacgccgtggaggaattcgtccgccccggtggtcagggtgagtctctgcagaagcgtcttttggctcgtgctgccgacccgaagatcaagaactggctctccgaatggtggaaccaggccgcctacctcgcttaccgcgaccccgtcatcccttacgtctcctacttctactcctaccgggacgaccgcgagcgtcgcaacccagccaagcgcgctgctgccatcaccactgccgcgctcgagttcaagtcgcaggtcgatgatggctctctggagcccgagtacctccgcaaggagcctcaagccatgagctcgtaccagtacatgttcaactgctgccgtatcccctccgagggcgcggatttcgctcgcaagtatcccgcttctgagaaccagcacatcgtcgtggtgcgcaagaaccagtatttcaagctcccggttgttgtggacggtcaacagctcaacgtctctgagttggagaagcagttccagcgcatctacgacaccgcacagcccgcgccccctgttggcgtgctgactgttgcggaccgtgatcactggaccgctgctcgtaagaccctcgttgctcttgaccctgccaatgagctggccttgcaggatattgagtctgctggcttcgtggtctgcttggatgatgcgcgccctgtcactctgactgagcgctgctcacagtactggcacggtgatggctccaaccgctggttcgacaagcctctgcagttcattatcaacgacaatggcactgctggtttcatgggcgagcacagcatgatggacggcactcccacccaccgcttgaacgattacgtcaacaacgtcatcttcaacaagaagatcgacctttccgccaagaccgtgcgctcgcagcttgccgaccccaaacccatcgacttcaagctggacgacgccgccaacgaggctatcgacttcgcaacccagtaccaccgcaagcagatcggctcccacgagctggttgtccaggcctaccagggctacggcaagggtctgatcaagaagttcaagtgcagccccgatgccttcgtccagatgaccatccagctggcctacttcaagatgtacggcaagaaccgtcccacctacgagtccgcctccacccgcaagttcgccgaaggccgcacagagaccacccgcaccgtctccgacgagagcgtcgccttctgcaaggctcacgaggacagcaccacccctcgcgaggagatcgtcaagctcttccgcgctgccctcgcccagcacaccaagtacacccaggaggctagcgccggccacggtgtcgaccgtcacctgttcggtctgaagaagcttctccagcccggcgagaagctgcccgagatctaccaggaccccgcatacacctactcttcctcttggtacctctccacctcccagctgagctccgaatacttcaacggatacggatggagccaggttattgacgatggtttcggaattgcctacatgatcaacgagaacaggtaagcactagcaccccgaccctttttcattcatgcatatctaactaatctctccagcctcaacttcaacatcgtctgcaagcgtcttggcgccgaccgcatgagccactacctcagtgaagctgccactgagcttcgtgacttgctcatgcccgacttggctgcccagcctgagaagccgaagctgtagatgtgtcttgcatatacccggtttttattacttttggtgcttttggatttatgtttccttactccagcgcctgatagatgaatatatatttttcaacttggaatgtctgtacggagtatttacacttgttattgtacacaaagtttgacttgatctttaccttcttttatttgaattgatatatttattcttcgtatacatttttctattctagaatctatcagaacgatagtatttctttccccaggtattagctagcattagttcgtttagaccaatgaaacccacctttgtgatgtacgatcatatgtcctaagtcatatctcaacgtagttctatatgtcaagagattccgaatatcctcaaatatcaaagtccacgcaactccgagagcttcgcaggagccacccacatcggggaattaaagccgtctacgactccaccacgacattcctctccaatcactgcaccaccactctatgaatcagtcctttttcgtcgtttctagcccaaaagagccagaaataatgtcggtgatacgaccacggcccgacgctatagcaccgttacgcgtccatggcgtctctactatcaaaaccaacgcccacctcaatccatcccttagtcttgctctcctcaacagagatacatgtactccgtacatacatacccattgaacaatgcggtacacagagaaatgcctctgggccctgtccctatccctaactctctgttccccatcgcaagcattcaccctcgataatatcaacacaacagccaacgcaaaccacatcttcaactcaatccagtcaaccctccgccactatgaatcatccatctacccaaatggcatgtccttcttcatagccaccgtcgaaaagggaacacgcttctaccacggcaccgggacaccagatcctatcgtcggcgtcgaatggctagcctttaaaccgcagcattcgcttggtttcgcgcatcgtgcacacggtcagaagggattcatgcacaagaatgatgagcatgaccatcatcgaaaccaagatagagatctagatcaaggtcaaggtcaagatcaagatcaagctcctctgggaaatccccctgtccatccccacggaaacacaaacacaaacgcaaacacagaccccgtcaacgcgggctacctccacacctacgccgccgcaaaagacctccgtctcctctacatagacggcatgtccgctggcccaggcggcgccctcgagtcccaggaccgcatcctcttcaacgacaccatttcccatccggagcccggcccgcgtccgcctgtcggtggtccgccggaggagaaggagcgcgcgttccagacttgtcggatggtgaaggaggtttggggggagagggttgatggtattgctcgtaccgagggcgattttgagattattctttgttcgtttgagcgcgatcttgaggttgtggctattacgcagacgaagcctcaggttggtggtggtggacctggtggtggtcctggcggccctggcggccccggtggtccaggtggtcctggtggtgggagggggaggaagggtgggaggaagggtcccggtggtcctcatggccctggtggccccggtggtcctcgtgggcggccacagggtggtgattgttgctcgatcgatgcgcggtatgatcggttacttgggcagaaagtccgtttggatttcgatcactttgtcacggcgtatgggtacgaccttgatcttttccctggggattcgaaaattccgttgctggatcatattcccagtgaggagtttgagcctgttcgatcggacatcaatgagatggttaacactcttcggccggttgactctccctttgattggcaggctgttgctgatatgattgttttccggtactcggatgaactgcggactctggcagctggcaatttctcgtcggttgatgtccttcggacgaggattgagggtgttttggagccttttattgattatagggactttggggccagggaggatattgttgggttgtgtcagaatgagtttattcctgcttctgctcctgctgagtctcttgctggccaggttgtgtcttccatctctcgggaggtctgtgatactttggcatcagggctgttggatgggaaggatttggatgagactgtggagagtttcaagcagcttgtttcgttcttgggctggactacgtggaagtaaggatgggtcgctattcgagtgagactgttatttttagactcggatagtaatgccaattaggtcttgtgcaagggattaccttggataattgaagtcgtttattgcgttgacgcagttcaacttctgagtatttacgtataacgcaaagaatgaagtcgacatgtattgtcatggatttctatattaatttcagtttcccatagacctcgccacttccaatgggaagttttgctagcgacagcaacaggccatgaacttcatacaaaacactgtcagaactgcaacattgacaagcgcatagagtcacatcgccacgaaagaaatgggaaccgtcctcgaaagatgggatatactgaccctcatgaaaatctaggcgccaagattgaaaaatcgaaaccggttgcttgcgggaggattgcctgtggttattctgtggtattgcatagagtattgaacaattaggctgatgtccgggttctcgcctgtatcactcatatcacccctgtgcgggtcaacgagctacgactcgtgatgaatgcacttttcagtctttaccgtctcgcgttgtactcacggcaggcggggccgggggtttggtccccgcctgccccgacgcaaannnnnnnnnngggggcggcccggttttcccgccccccgctccccccgacgcaaaccccgaagctgttgttgcggaggcggaggacgcaccgtgggaagtcgtcaggccaccgatttgcctctctgtggagaaaattagtacggagtatatgtatggagtacgcgcttaaatcagatccactctcggggtggggttactccgaattactgtgggctcaagaaaaaaaaaacgctaaaccggaattctcttacctagttctcggatgcgttgccgaaggaggacgttttctcgggctagagagctcgcttcggcctggtaaaatgcaccctcgtcccggctaccgcgccgagatgcactatcccgcaaccccggaaatggctccacgctttctccgcgcgagtctagcggtcgcaagttcggtgacgccgcttgactgggaggccgcgagcttcggcggtttgatgaagaagagatcgataatctattgccgacaggaggtgtcgggccgggtgggaagaaggccgatcgttccgatgccggagttgtgtcgtcgattgcagcggtggattgtgggttatgttgctgctggtattgatgcaattgggcctgctggctgcggatcatcagaagaagccggttctacatttcatagttactcggttagcttcctacaaggctaaaagggatgattgacctaccacttgtgcttcttgttcttgctccagctcttggtgtagctcccccagcgatggtgcacgctggtgatgaggatctgctgtcgcaaagatgggacttgacgggctggctgtgcggaatgcatgtccgatcgggctgcgatggtcacggtggtctaacgcgggtaactcgctgctaggtcccggactagtacccagcatctcgttcacgttcgaattaataccggcagtggatcgacgttcagataccgatagtcggcctatgcttgagccacgggatggccttggtgagacagtgttcgggttcacgggcaccggaccagttccaggagcggccatattacgttgcgggatggaggaggaggttgaagaggaacgggatggaggaagggaattcagatccggtgacatctttgattgataactgcgttgacgtcgaggaatatgtatgatgcgaagctctaatctgtagtaacgtcagataatcccgtgaggatctgctgactcagccaccgctttcgcggggtcggtcatgtgacacggatgccgtttatggaaaccgacgccagaggctgaatggctagaatgctccagcctgtctctacaagacccagtctgacagtattacaccccgagtgaatatggtacaactcggattctttctctcggggcttatatgattcttccggaatatggaccaggccagactttccacgggtacgaaggtcacggcacagcaaatcatatcttggcccctggttgcgcgcaggccaaggagaggaacacgccggtttctctatgtggcgctcaaatttacaatttctaagagtcatacttctataccgacatgtaaaacaaaatccggggatggccgcaaagatcttcagtgtcgcgtggcgctccagatacgatcgacaaaaagcacgagagtccgggtccgggggatgtgggatggactgtggttgtttccggataacgtacattccgtacattcccccttgaatgtgactagcaaaaccttctttttgcttttaccccagtgggcaatggcgggtatcggtaatcatggggaaatgtcctccgagtgaacgattctgcaagggggagatcaggccatctgctggtaatgcggttatggttgtggttgtggttgtggttgactcgttgactggctgacaagtacgtaattggcggccttccactcgttattctggaacgtaaagccgaaagatgaccgaagagcaagttccctcctttgcagatcgaaggatttgataacccgacagacaaagaaaaaaaaaatttcaatcctccgtactcagccgattacaatgtaagcgaagggcgtgctctggtcagaacaagagttatggctgccaagccctgatgacgatctaacgccacgcccgtaatatgaaccacagcgactctagtgcatttagccgcagtgcctgtcctggatatgattgacgaatgacctgatctcttgtggttaacctgacgtcacatatgggcaaggcaagtcatgggcgacttggcaatatcttgttttaacaggaacacgttgagtttggagggagcaatgggcgtttttttcttccccacagcgtttttttgtttttttagccccttttgtcattttttgtacccgagtccactccgtaccacgcagaacttcagtcgcatatggagaaccatgcggccgggcacggtcggcaataaccccggctccttgcttcgcggggcacatggggtttgatatcccgatcgtcggtatacttgggtgtagatttgacgtggcatgtaagaagatattggacagactcgaagcggacattctctcggcccagaacggcaaacggggaagtcgactggacatgaccgtagttgtctccaatgtgggtccgattaccccaatgagagggttcctattccggctaattagccctggaagtaccagaaagcatcgaatccttttcacccatgggctgtatattgaaggcaattccgtagacgacaaagcgtccaaagaggcaaaaaagggacagaggaaaggggcaaaaggaaacggatctgaagagtctggagagaagattcgaagtctggagaaaataaagtggggtaccacgggggacatcggcatcccgtgagtgtatagtcagtaccaagtactccgtacctcaggtacattggtaataaatccaggattcattccactgaggcaaaagtattcaatcacggaacatgcgacctggaaacttttgtaccgacctcgtactaacccggtactggaaatgtactgacagggccagcccgggggaccgttttggttctttcctgcatttggctcttgcctttttctccccgtttctgtatttaattcctccttttcctcttccttttgatcttcactctctatctctttctctccattgatctttctccagactgcttgagacttctccacactttcttgtctcatttcctggggtttcttctactatcaactggtcttgataccagtttaccctatactaccccatctctacacaaagtgagagtcaacaatgacgaataacgccgacaagtacgggagggacaccgtgcaggcagcagaagctgcccacgcccaagccgttgtcaatgccgctacggaaaagttggaagacgatcagctcgaggaggcctcgcccacacccgatgaggttatcgagctcaccgaggacatgtgctacgacaaactgggatactcctttactgaaagaaagaagtggatcatcattgccgtgatcttcctcgttcagacatccatgaacttcaatacatcgctctattcgaacgccgccactggaatctcagaggagttcggtgtctccatgcaagctgcccgttgtggtgccatgatcttcttggttctttatgcttttggctgtgaactctgggccccctggagtgaggagctgggtcgcaagcccattctccaggcatctctcttctttgtcaacatctttcagctccccgtggctctggcccccaacttcgcctccatcatggtcggtcgtgccctcggcggtctctcgtccgctggtggctcggttaccctgggaatgattgctgatctgtgggaacccgatgatcaacaatacgccgtggccgccgtcgtcttctcgtccgttggcggatctgtgcttggtccagtggtgggtggcttcgtcgaggcgttcctaccgtggcggtggaatatctggattcagttgatcttcggtggtttcgtccaagtggcccacttcctgttcgtcccggaaaccagaactactgtcatgatggatcggattgccaagaacatgcgcaagtccggcgaaaaccccaacatttacggtcctaccgagggcatgtcgttccgccagcgtttcccgccccgtgaaattttggctacctggattcgtcccttcaagatgttcctgactgagcccattgtattggtgctttctctgctgagtggtttcagcgatgcccttatcttcatgttcatccaatcgctctctcttgtgtacggccagtggggcttcaacacctgggagaagggtctggccttcatcccaattttggttggctacttcatcgcttggttctccttcttcccggtcatcacacgcaacgtcaaagagcgccgcgaccatcccgagagcgaacgggcacagtatgagtctcgtctgtggtggctgctttacaccgtcccctgtctaccaatcggtctgatcggattcgcttggaccagtttgcctcagtgccactggattggatcgatgatcttcgctgccatcattggtattgccaattatgctatttatatggccacaattgactacatgatctgcgcctacggaccatactctgcctctgcaaccggtggtaatggttggtcgcgtgacttccttgctggtgttctcaccattccggccacgccgttcttcacgagtaagttgccacattccacacatttcgcattatcatactgacaatttttgacagatatcggtggcgagcgccatcttgaatacgcctcgactattctctgtatgtctatcctttcctgtctcttcgcatgagccagtggtctaacctgttcctagtctgtatctccgtaccacttgtcgttgcggtctatatcatctactggaagggcccgacattgcgcaagcgctctccattcgcccagcagctagaggatgctcgacaccaaatgcaggtgcagagccgacgagggtccaagatccctccggcatcacgcgccagttcttatgctcgctctcaacaagatcttcgcatccgcccaacaatgggtagccgaggcaactcccgggtcaattctcaagtgaattcccgtgccaactctcgcgccaattcgcgccgcaacagcatcaacctcaattcttgatcgctgttcgtttttgttttgctttctgctgtgaatactcatacaatgggagtgagattactgtcataggaatctatgagaattttcacatcccctcttcgtgcatgcgccaatcctacgctgtgcgtggctggcactaattcttgcacccgacgctcagtggatatcccactcctggtctgtggctttttgttcttgtgcacttcaattatgatgggaattggactggaaggaggaaagggcgcgggttttaaaaattaattgtcttgtttttttgtgtttgcttccactcgaaaagacaagatttgcgatctggggagtgtcatgtatgctatgggtttcgtgactgagcggtaccaatcatgaattataccattattattcgctaggaatgctttgtggctatcagtatgttaacttagtaagggtggagggaagatattacctgcagcagtatctcgttcgatctaatacatcagtgtctagtagtacattagtacaacatgaggtcattgacctgacctagcaccaaggacacggtagagacatcctatcaatgcctgtccggctccggccgggactggatatgtataagtcaataaagccgagggtttgattctaagcaagaacccgcttagtataacctgtggagtcgctacactcccacttgtaccttcgtgcttcctccaacccggggccagacctggttagggttagtgccaaatgttaaaaggacttctggtttagtatcactttacattgaacctgggcgggattgttatatgacattcctaggtttatatatatacatatcgacagacagatggtccatgtttcaagtgggcttacctccgacatctggatatatatatctactcacttattatccctttttgctgtcgacaaaatggactagtcataaatgcacatacccgtggacgacaacttaaatctaacaactaaggctaaatagtaggcgatgacaggtctcgagtagaatggtggaatggtgcagtctatacaaccaacgcagcggagtgttgcagcacgaattaccgatatttggtgactttgcgtgcattttggaagatagtagcggaatctccaagttcccgccaatttgatggatgagaactgcgctaatttccaggcagatgagtattggaattgcatgtcggtcaggacttgacaagaagattttctagcaataagactctttattatgcctatgcatggtctataacttggggttcacgacctataaagcatttcccccacctaggtaagtgcatagatttggaataaatcgcacatctgcagttctatatcgaataaaatatgaatacatacgccgtacatgatgtatgaacaaaaatagcatcatagaggtctcagccaattccgataagacactcttggcccgtgcgcctcgacatgtaccaactttccaattcctcgacataacactctgtacctactttgtaccttagagaatgaatcttgcttccatgcgtctctgtgctagacacatctccaataccagacctctcacccgactccccagtctgcacgcacccgcattccccctctcgcgtccattcccgagaatggcatccagcgcgtttcagttcgccgagggcgaggatgcgcagcagcttgcgcacgacgccgacgctttattgcagcggggctgggcgcaggacggagacggaatgggggttacaaaaacgttccattttaagagttatttcaaggctgtggtgagttgtgtcatttgtctggactgggactgcttccgctctgctgtgagactggtttaactgacaatctcctccgtctaggcgtttgttaatatgattgcagccgagagttcgtccaagaaacatcatcccactatgactgtggtaagtggaactttttgagttggtgcctcgaaaaaaagaaattaaggctgacgcctcgttagcggattggctcggtcgatgtgcactggacaacccatcgccctcgcgggttcacacaaaaagatgttacgatggcgcagcattgtgacaagagcgctgatctgatgggcgctgttgatcccggccagggactgaaatgtggtccaactgtctaggttgtcacatttcctcgaatttgcgtctcggcacttgcagatggttctttattccccccggtctggccccctcgacgcacactatcaccagtagatccccccaccggcggttggaactaggctggatgcgaatttccccttgaaatccttggtctttttttttttcttctctctctggatgtcttctttctctcccgaaagggtcgttcctcgattgcgatttcaatctcgactccgatttctctctattacacatttatagatatattcaaacggctatttattgtcggatgtgccatgacgtcgagtcagtccatgcccacgttcccttccgatgatcattgcctatattaaacctcgtcgctcctttttctccaatgcgctcgacaccctgaaatcccgaagtcttgaactgtctagagctgtgtggaactctgtgggactgtcttgaacgcgctcctcgacaatgaatccagatccgccatcaattggcgaacgcagaggtcatcgactcgcgcccctacagaccaatttcagtcgaccagctgctcaaaaacgggtacaacgcccacggccaaccgagtatccaagtaccaatggatcagaaggtcccgttccgcttcagtcccacgttaaacggcagtcctctaaaacgagtctgcgcaatctctttggtcataagtcttcgcgcgcagaccccaaattggaggagattatggaggcacagccagaacctcaaactgccattctcttggaaaccgccctgtcgccctctactatgagcccccgaactatagactccaatcccaccattacctccccgacaattgcatccgcgacagaacgatcgcgcgcgacattgaagtacacccgttcgaaacccgaacccgacccttcgagccaggaacagtatggctggaagcctcccccattattccaggcctatccccaatccaccaagcatgactgcctccctgcacccgctctctctgcagattctatcttgcgcctgcacgctacaactacaaggagctctactgacgacaaccctgccaatccgttagagcaggatgaggctgccgatgccgctcgtaaaaagcgggaacaaaagcaaaaaaagcatctccggacactatctggcaccatcaacaaggcggattggactcagaaagtatatgtcctggctactaccggctatattctccaatatgcaggcgaaggaaagcacgaccgtcttcccgagaggatgctgctgttaggacctaagtctgtcgcatttgctagtgacgctatccccgggaaacattgggtagtccaggtctctcacaatccgacaactgatgattccgccgtaccggagcctcccaagcatcgattcgcgcgctttggcttccacaaacatactagccggcggtttgcgcgcaactttcttttggtgtttgacaatcccgaagatatgatcagctggttagcggctataagagctgagatcgaaaaacggggaggacgtaaattcacgcaagagaagcaatcggacgaagacacaatgcctcagctgcggtccaaatcaagcgttcgacaaatggtaaagaaagatccccatcgcatttccagtcttttccttcagcctcagaccctccaatcgcccgccgaggacgaagatggccagtctgtcggcggtgccacatggcaatctcgccgcagttcatatgtgtcggttaatcgtcgctcaataattgaatctcgatccggatcggtgtcgactggccgaaccgacgccacaaatcctaccaacggctctgcttctgtcgtgtctgacattcattcttcatcattcacttcttcgaatatacccaactcgccgccattaggtaccgacgctttcaggcctgatgagcctgtgccggaagagcttgaccgagtctacacgcgcaccccgcccgcttctgtccatggaaaacgacaatccttatatgttcccctgccatctcagcctccccctattgccgacttcacagaggagccacaagcgcatcacccaccagctattcccgaagctctcattcgcagcgcttcacctccagcgcctaatttcagtgtcccctcctttagcaagaaatttgttccgcgatccgggccgatccctgtctctcatgcctctcccccttcatcactcaatgccttttctcgtcatgtcgacaccgacccaaatatatccgcctttgcatctcctccgcaatctccaacattcagcgtcgctagttcgcgctacacagattcatcagagcccaagcgcatactacgaccctcgaattcagaggatgccctgaccaaagccgttcgttcagcacagaatgccaaaaacttttcccgggcacccagcacagcgcctcctacgtgccctctacctgatcccagagcatcttcccgtccactcagcctggtcggccgccctagcatgagtcggaaaggcgcctctgcatcacaggtccctccaccagcagatccaataccgcgcaagagagtctccactatgtacccgaacaaccaggatggtccgagcatgttgcggcgcaagagcatgcccggtctgggattatcaatcgggcctccatctgcaccaccccccaactgcccactccctaagctccctccacccgcccgtcctaccgtcaataccactatccctactgcttccaccggcacgaccgcgccgcagatgctatccccctggtctgcagcgtcctcaacgcaccgattctacggctcccagccagtgcgtgatcacgttgaagatcgcaagagcggtgccgatcccgcaaacagtgacccagcaagcaacatctcacgaactgcccgacactcaaaactgatcaagagccccgtggtctaaatccaccctcccctgctgtgactcaacatcacatctatgacacttcacctcgctctaacatcgattctccaaaaccctacgagctccttctcacgacattaccttgagatgcattccctataccctttttcctttctcgcatctgtcattactatatctggcatcgaggcctcggcctcataatcaaatacccctgttgcacctattgcatatctgacagcctatcatatccattctcttgttgcgcacttcggtcgtaccaaccctggcgtgcgtacgttggttcctcttttgtctttactatctacagattgcttctcttcgttgcgtttgtgtttttgtatataccccgttttattctattctaggagcatatctcttccctcttctgaactcggtatcttctgtcgagaagtataagtcacggagatccgagcctgtacattaccatatttccttcttatctagcatctgaaatatccgaatacaagaatcctacatcgatttgatgcccgaagagaagttgtgcaatgaattaaagacagaaataaagagaaataaaggcgttcccaatgatatcgattctcagagcaaggcctaaaacgccagaatgaatatggaatatggatcttgaaaatacaaatatcatggatggtttgaaataaacacccgcgttggacctcgttcgaccaattccggtctatcggctttgaatatcgttcacaacgtagactactcctccgcctcttccacacttgcgctcagaactcgtcgcggtgcgactgcggatggggtagaagttggctcggcggaggttgtggttgccgaaggggcgttttctgaaggggcagctgagggagcagctggggccgacgcggcaactggggtgggagcagaggctgaggtcttggatttgctagcctttttgctctttttcgtctgtagggttgaatagtcagctttacgatgtccgaaaatgtgtcaatagagaaatgcgtacctcttgccagccccatagaggcttgaaactatcgaagaacccaacatcctcaaacagattggggaatagccagagacccggggccacagtgaagacggtaatgcagaatagaatcaaacggaagatagccatggcgaagaagagacccaacagtcccatcataccaacactcaaataccacactccctggcgcataatcataggccacaacgggaacaggacaacggcgaagataccggcaaccacagcagcggccatggccttttgcttccactgcgggccgtcatacaaccaaacataatgcatcatggggtcagtctcttggtgctgttcgatcttcacggtccatagacccttggtgcgattcttgggcttggcatggttgtggccttcatgggcatcaaccttgctcactcggagagccaaaagggaaagtggaagaagcttgaaaacgttctcggcggaggcgcggtcggtcactggggggaggagggagttcttctttgaggcggctttggcataggcgggggattcaatggctcggattgcgcgcttgactacattgaatgaacactgttagatggcgattcctcggaaatatttagatcttggtcgctcacccttgaacatgtccttgcgctgtccgtccatgatacatgtgcgtggcttgaggttctgcgaccgcagccagttggccactgctattgcctttgggtccggggggttgttggggttcaccgggacctgttgtgtggttgtgtgttggtgctgctggggtgcgggcgacggagcttgttgtccttctgttgctgcttgggcctgttgttcggcctggattttctgttgctgctggtgggcttgcattgctcgcatgcgcaactgcgcaacatattgctcagtagtcagaccgagctttgtagcatcggcagtcagctgttcacgctgctttgcggcgaactgctggggcgtcatccctcgtttggcggcttcggcggcgaactgttgttgcatcgccgccatctgctcagggctgggctggccaggggtggccattttgaattaaaatacgggataaaaagcagaagagaaaaggaagtccaaggcagaggaagttgtgaaagaaagaaagagaagtggccacattgactcagctgatttgtccgccttcccgacttccccgacttcaatcttcttcccttttagcaacgaacatcaccctagacatgcactgaacatgcgcttcggagctatttttatgtcgatgctcaatgtctgtccaatatgactcttcagaaaccttgttaaacgctacctgggtggctgttcaactggtatgtgtctcattgcgcagttgatgcctccccgcttatgcgaatatcttaattcagagcgaacgagatgtcgctggccagattccacttaactatgtgacgaaccctgctgtagcattgtcggctgcctgtttcggaaacggcatctatgatcaacaagatgctgcacaatgtttctccaacctcctcgcaatcgggtaccgacgttttgttgtcgatctatattggtcggtcagccgtagaacttggtatttctgtccggtgtctattccagtcagccctggggtgactatatcctcagccacctccacaacgaagacaaccacagcaacagctagtgcggactctgcgactatcaccggtaccgacgattcaaatggagacacactctatgagctaggctcatacaagtgcaccgacaacctcgatccctataccttggcggaagtccttgtaggttatttccgagacacaaactcccgtttgaccgtgtacacgacctatctcgttctcaatctgcatgtcgccgcaagtgcctccacgccaaatgagcctgcttctaccatatcaggaggtcaattgccatcgggaaatgagctagccggctcaattctgggaaccgcgcttgatgactttatctatagtccggctcagcttgccacggacagaagcaatctgaaccaatcatggtataaggtcgacgagggctatatgcccatcacggagtattttaccgttcatgaaaatgaagcgggtgaacagagcactccggatggctggccatcatcaaagtacattcagctcgccaaacgcgatcgagtactcattggatacggctccatcgattcccagctgttgaattacaatctgtccaccgaaggaaattcggtctttcctcctggatacctgacttctgatgtgacggtctccgcaaccaacggcactctgacttcaggctgtctatatgaacctgggttcacaagcgtgtctcaaaccaactcatcatgggctatatccagtggcctccctgtccttgatggcctttccacggatgagacgatggcttcgctatcgaatgttctctccggaattacagcttgtggtctctcgccaatgctgaacactactctcttcgaccagactgcagaccagcaagttgaacattaccgtaacttctcactttcctcttcctgggcttgggtacttggtgagccacacgatgcgaactatggcggcggcgacggtgatcccaagtatgaccgctgtgcaatcatggatctaacactcaatggccactggcggtccacgaattgcactgagaagcgtcgtggcgcctgccgaatcggtaattcgcctttctcctgggttctatcagacacgatcgaatctttctctaaagtgtcggacagttgtccaccaggatcaagtttcgctgtaccgcgtaccggtctcgaaaacacgtatctctacaggcatcttctctctctaccagaaacaacagtcgacttgagttccgcagatcccgcctttcgagaggtcttcttagatttcaactccatagatgttacttcctgctgggtctccaatggctatgaggctaggtgtccctatgcctctgatccgcagcaactcgagcgcaaaactgtacttgtcgctgcaattgcaggtatcatcattcttattatcacagccttgactttctttgtcaagtgcaacgccaaccgccggaattcccggcgcaggaagcgcgtcatcgaaggatgggaatatgaaggtgttccctcatgagacactctatacacctgacatgtaccctggaagtgctgtctcggcctttttggttgtatgtcaagattgggtatctttatatacttcacatctataattccaaggatcctgtcctctgtagcatcgaacttgtctaaacgcactcctctcaacacccttgaggggcttgactctatggtggctaggaataaacacaataggcgactttttgaaataatttggttctgtattctatggagttcccttttggctgtctctccttacatggagttcgttatttctagagttttatagactctcttgaatcgtataaagccgaagtttatacacctattcatttagaccgtctagctgttatgcttgatttgaatgttcattaaggaccagaactagatacaacaaaataaaaccataatacataaaacaaaaatccacacatatttccataaaaaatcaaaccaatggaaactggatataagtgtcccaaacaacgctacatgccactcatgaagacaaaccgtaaactcctagaaaagaccctggatatcacattcaaagcccggcaaaccgagcccatcccgcagcccgatttgctgaagagctcggaacctgtgggtgagtttcgttctgctcgtggctgggaggctcatcgagaaggctttcactgcgcccttcttcggcaaccttgccactcacatcgcggcggcgtccgacgcctagaccggcgatgtaactcccgtatgtagatagggatgcaccaactccggctgcaatgccagggcgggcagtgtctgcgccggtgttgctcacgacacggcccttgcggtcgctttcgatggcgcgtggcgaggcagttgacaggtatccattttcttcatcgttgtcgttcttcttgagggccgcataagcagacatcttgctgctgcgtttcttcgtaagcttggtgggcttgcggacgacctgttcacttggatcgcgtgacgccaatccaggattgccattaacatccagctcaccatagaagcgggtcttgggcgaggtgggcttggggctatcgcgtggaacaggctctgtctgtgcctgtgtattgtgtgagagattggggctctcgtgtggaagagacactggctgtgcattgtatgagatattggggttatcacccaagacaacacgccgcacgggatcggtgttctcgggcctatcggtcaggataggttgcggagttggtgggttaagcatgagtgggttaaatggaagatactcgtcatgctcgtcatcaaagtcgtctctgtgatattctgggtctgggaatatgtccatacgctgatcacccacatcttgttcacggcggttatcatcaaggccatagaattcatgtgtggtgagcgacgcatattccccgcgtacatcctctgggatcgcactagcagcacctggctcaggcttggggccataggcaaaccagtctcgaataccactactgacagacgtcgtggtcttgttgctttttcggctgtaaacagaggaggactggcggagagtggctgcgctctcgtcctgcctctcacccgttggcgatagagatcgttcagagtatgccacccaattatcggacaatgggctggcagtatccgaccgatcagcagtacgtgatgacagatgacgcaattgggcagtagcatcgatgatttcgggggcatgcgaggcaactttccgatattctggggcaggtgcctgtgatgtgaagtcatagggcagactcgcgggttgttggaatagtgtgtcggggctggagggatccatgtaaggttctgttggggattccaagtgggataggcggtgctggtaaaaggatggatgtgactgccgctgctcgtcgagcatacccatcgattcacggttgtaatcaccaccaaaagactgttcacgtgtgtgcatgaacggcacactgcgaggagatccaatgagcggatcctcgaagctggaattcatggtggattgactgagatgtttctcgtcggttcgagcctccttgtggcttatgcggggacgtgcggtcaaattgtcttcaagtgggttcatgtcaggcggtaggcgggagatcttccggaatgtgacagccaagaaacccgatatagcaagggagatgaggtgcaacccgccatttgcgatcgccaagatgaaggtggcctcggacagttttacagtcaggtcgctgttgttgaagagagttccccagtgatatgcattggaggtccattcaccatacgcgataaacgcagtaaacacgtaaaatgggatgattcctaagtcgacaatcgcggcgaatagcccatagctggcctgagagcctgtgggacgcctaagagcagaccggcaattatggtaagcgccatatatggtgtggagtattgcaactatgggctgcaataaaaattagcaagagaaagtcttcttgggtgggccgtactcacgccgacgcgaatgatccagatgacggtcactgcagctcccttgataacgatagagcaaaatagggacccaagggcgcccagaagactgagcactctgagtgcgagctgactcccccgtgcatacttgacccgattctttgttttgtagctcatcggtgtaaatgaactgaccgtattgaaagaaccccactacatccacatccaccattagcagaatccatcactaattaccgaaaggacacacataccgtgtcagggtgtcggttcagattcacttgggattctttttgctttggcttgtctgttggacgagtccaaatcgtcccggtcgcgtccctcgggttgaagccgcggtcggtcggacctttgaaggacggactctcataaaggaatggaggcgacgatctccccatggtagcgactaaatgccactcgtggcagccacgcgaagcagaattaaggaatgttgacgaagttgaggatgtggaatgcgactgtcaactcctgggatgtgcccaggtcacaagtatgtcgtacatccgcaaacatgcgatagtcacccggggcaaccgataagggtcacgtgccctgtatcattatctccgatcacctctgcggtttctcgaatccatgcaccatgcaattaaaacaggcctttgtatgtgctcaatgcacggtacggcttaatcgccggcctcttctacggtgccagagctttgtctctcaatttatatccaaacgctccaacagtcatgtcgcccagtctgatcgacccgtccgtgtggccatcgtgggctccggcccagcgggattctatgccgcctatcgtcttttggctaaacaggaagatgcgatagttgacatgtatgagaagctacctgtgccattcggcttggctaggtacggtgttgccccggaccatcccgaagtcaaggtgagtcacggtaaaccgcgattcaatgatgagtcggtcattgaacattgtatgtagaaataagctcatgattatatgaaaattagaattgcgaagataaatttacagaggttgctgagtccacgcgcttcaatttcgtcggtaatgtcgacatcgggcatgatctgccgctcgctgccctcaaaccacactatgatgccatcatattcgcctatggtgccacagaagacaaggagctgggaattcctggagaaaaagctttacatagtgtgcactcagcccgtgcctttgtggggtggtacaatggtcttccagagcacagagatctggatccagacctaagcggagaaaacgccgtgattgtcggacaaggcaacgttgcactagacgttgcccggattcttcttacggatgtcgaaactctccaaaaaacagatatagcagattacgccgtggaaaaactcgccacaagtcgcatcaagcgagtgcgagttgttgggcgccgcggacccctacaggtgggttacaatgaatcgactgacggtacccaggttgctaattacttgacttaggcttcctttactatcaaagagattcgtgaaatgctccagcttccagatgtatcatttgatcccattccagacgatatctttccgccggaagaggtcgtatcggcactgccccgggcgcagaagcgtctaatgcagctcttggctaaaggttcagccaatgaccctctgaaatcatcaaagtcttggtctttggatttcttacttgcacccgattctcttcactggtcacctgattatccataccatctatcccacgtgaagttctctcgcaacgaacttgatccatccgacccctacagccccagctccaaggtgtttccaaagcacttatcgagcggaaagcgtgcacaggtgaacctaccagctagcgtcttcttccgcagcgtaggctacaaatccctcccccttccagggctagaagatcttggtatcgacttcgatacccggcgcggtatcatccccaatgatggatttggccgtgtaacaagcttgtcgaacaagggccagcctgaagcgttacctgccggatctctcgtctcccacctacccggcctgtactgtgctggctgggtgaagcgaggtccaacgggtgtaattgcctcaacaatgaccgatgcatttactactgcagacaccgttgtgcaagatctctcaaaaagtgcaggctcaacgtccttgctcaatgcacccgatcacggtagcggtctaggctgggatggggtgaaaatcgaggctcagcgccgtggtttacgccccacatcgtggacagactggcagcgaatcgatgcggcggagcgagagagcggccaacgaaagggcaagcctcgggataagcttgggcgtgtagaagaaatgttgaaggtgcttgattgaacctttatgtatattatggactatctgcacagagtttgacaattctaaatacatactcagtccaagacttcgttttcccttggcattacaccgctttcgtgtactattccgtcccttcattatcacattccatagatcttgtttaacgctcagagcccgcacgcgctggcatccgcctcctcataagtggcgtcaatacgaccaagttgctccgccaggccgttggtgagcgtgttcatggcttgcaggccaatgttgaagccacttggggcggcatcgatagcaatgacgtagattgtctcgtcaatcttgtcgttcgagtagtgcaacgcgtagcatttgccgcagttagggctgttccagcccgggatggtgatcgcaccgccaatgttcgggaagcttggcagtgatgcgaagtcggtgtagccttgagtgaccaggccattaacaccgtcggagcaggagacggtgttcaaggatgatgttccaacatcatatttggggtcgtaggagacggacactgtttccgctgccgctagagtcggagcagcagcaacaaggctgagggatgccaagaaggcggaggtgaaggtgatggtggacttcatgtttatggaggatttgatggtactttgaggaagagtataatgttttgattgcttgttgtatacatttccctccctcccgacgaggtttatatatctccatccgacaggcctcccaagtaaaattgctctaggtcctctttgctggcaggccgcattcggcgcaggttttagatgaaggtctcagattcacaggtgacacagcccaaataggatgcctttatcttgtatccatcagccgatactcccgtaatagatcatcccccagaaacaggtgcaataaggccgatgtctattgtggggttctcgagggaacatgcaggcagagcctggcagactgagacacggcatatcccgggtgctattttcatacgatctgcagaaggatgacatggtcgatccacatacagctcacgcgagattctctctatgctacatacaatagggcgactgcatctgaggttgcatcataacacctcgtacggatacatagaacgaagcagcatagccacatttcattctcgtctgagtttgaatcacaatttaaaattatttcaaaagctgaactcattaaaccaaaaaaagaaaggaataggaggaaatgagggtaaagtaagtagatgaggtgaaaaggcaaaagaaaaacaatcgtccccgggaaggcttgaacttccaacctcccgattaacagtcggacgcgctaaccaattgcgccacggagacttgattgtggcagaggtcaataggaatggcattatgagcatgttttaatgcaatcgattttatagagtgtgaacagatcatagctggtacttaattaccccccttactattgacctatgagtaacgtgtgagtaacgtataagtaacggctaagtaatgtttaagtaatttctaagtaacgtacaagtaactaacgtgcaagtaatgcgtaagtaacggctaagtaacgcgtaagtaaagtctagttgagcaaccaacgtctaagtaactaacctataagtaacgcgtaagtaacgtctagttaggcaacttctaagtaacgcctaagtaacgtctaagtaatgtataatagaggcttggaattttatgaggctccggaagcttcaaaggttctttctccacataactatgcgccttaccgtgattagtcatctttatttttttttttcactttcctctttctttgcttttgttcttgaccaaaactgaacctttgaagctggtttcatagttggtaagctccgagtgattgtttctggtgctacaagaaagttaaaaccgcttaattgtgactatgtaccaccaaccgcaggcatggccacttcccatggtgatgtgccaagtaaggccgactcatggcagaccgacatatcacgattaacagcattgccatcgtaagcgattcattcattccattagcaagggatcttgctttggctcccgatactgatgtatagatatgtaaaaaaaaaaaagaagggcccgaaccgcgatttgaacgcgggacctcgcacaggttcacccgaagcacgaatcatacctaattattaattagttgagattcgcaggacagcttattgaagtggaacgtaccactagaccatccgggcgtttgtgtgctagagttgtctcttttaggaatcttgaattcctgatttttgccacgatctagtacgtcgtaatctactaggtcgtcaacatatgcttcatatttgcttgcctactgtttgcatgtttactggtttgcattacatagattgagatagctgagtgagacgttcaaggtttgcaacgtttgcaaatggccagctatatgggtcagggtcggatggtaagacggctaccaggacaaaacttgctagacgttgacctcgaaaagaggaaggacattttcccccgaatcgtaaatgtcattgtgtacctaggacaaatcaaaggattgacttctagtccgcttaccgactttcaatgggtcagttatatatatgaggattacagcgctagaacgacgttaagtctatggaagatatgaatatatatatctgcagcctcaagttcaagcatcgatctgatatcacatcacaccctcgtaatccctataatggcgatatctgccgaagatatcattcttgataaggacggacctatttgctttctcaatattctagatcctgtgcccagtttttcgaagtggccactattatatgtccatggtatgattccttccaagagcctcccgtgcaggaaggtgagagtgaaatgaacttgacggacgaagagtgacgggacatacagcttcttcctcgtgtacgccatgcaaatttaagatggattggatgtattgtgagagaagaagttgcctgggcaacctgattagaggctagttagatatatcgccatatctagcgatcaagtctctcatatcctgaagcattctacgataatgtgagctgggcggattgtccatttccacgccgatgagtgtcacttactgttctcgaagatgtcgatcttgggggaagagagccgagacatgcgtgttaaaccgtctagatatcgagttcagcgatctgatatatgaaaaagatgggattggtatacagtttatagagatcgatgcgaccttggtagtcctccactggagatgatatggggaagtgtaaatgatatgcttgaacatactcggaagcaaaccggttgcaaaccggtgcccattgtccaagttcatctattaagtttggttttagtcggttagtaaatccatgggctcaatctaatcacgacatacattcattatgagcgtagaaagagcaggcgtcaaacataatgggatttcctgtggtggcattcttcccggtatttccataccataaatcgccatgcaccagacagggcttgacagatcgaccttcactttcgaggggtcgcagcaaacgtgggatcaccttgtcaaatatgacaggactcaaaatttcgatgtcttcgctgggaccccgagctgaaatctcatgcgtcagtgcgtgtcgcattgatttagcaaagaaggtctcccagctgtccgaccactcattgtgctgtgacaggttgccgctataggtagtgacgtggaatccaaacttcccagtcggtgacatgctatcattgtgtagggccccaaggcattcagtaaactttcccacgtttggcagttcttgatttatatccttgaattcacataggaaaaaatgtgtgtcggatattgtctcatatgtaccccagccgatcggcctcggaacagaatcagggatgagattatagattgcagtcatagactcaaattcgccgtgaaccatcgctctgccactctcctctagcagaaccttcatgaagaatctccgaacagacccgtctaccaattcaacatcaatgcgccctgttgtagcccgaaagctaaagccgtgattctcagttgatatggctttggcgccatccggaagctctgtcatagtcgttattatcaggacacatttcaagtaagtcaagcaaaggatcactgatactcactagcagcgacagcggggtcaacttttgcgtacggattcccgacccctaagtcttggtttgcttgaaaactcatgactatagcaaaaggggagttattttttttctgaatcttgccgatgaatcttggatttagaggtgtgagtgaaagtttgcatgaggtttcaagaggaatcaggccggtatggtttgttcctctgtgtctcaggcaattacagcttgaggcttagcataaggtgatattgctcttaccagaaaggacccccttcctccacgacaggcaggtgacattgggcctttcttggcgacctcgtacattgttttgtttgcccgcgcgtatttacagtcacgtggtaaacattcacctaggagatataagacctacccgtccactcatcctccctaaaaattatgtagaattgatagaggaggatgaaattaccgacggagtgttccgcgttttacacaggggcgaataataccatatattctcaaggtagtcaaccgccccctttaccagccacgcgatacaggagtactatagcggtggttccttacaacgtgttctaaaggcattattcaccgcgcaaagaaaacccatatggatttgaaaccttcagatgttgttctcgacgataatgacaatgcggtcctcattgacattagcggcatcggcgaagtaacgcacgggtggcgtgctccagagatacaagatgaaatatcaccctttgaacttcctttccaaacgcgtcgattgaatgacatttgggcctgcggaaagcttttgacggaaattgcatcaaacgccgggaatagccccttcgtaggaactatgaagtgggttgcggatcatttaaccaaagaaaatgttcacagccggtggactctatctgagggaatctctcagttgaagggcgatcctaccccggagttcgacctcgtgaaccttgcgtaggataatattatgatttttttttgagtgtatacaaactgctatataggaactataatcatatctcatactccgtagagaggtgacagctatcataccaatcgagatctattgtccgctcggtaaccatgagaactgagactataagtataaattacatcttctctgagacaatcactctctttccatcatatattcttcacttcacaccattataccaaccccatttcatacccagtggccgcggtacagatatctaatgagttaatcataaatcaacttgaggatgaggtcaattaaccattttacagaaatgtcctcccaggagccacctcgtgatctagtcaccaatgagcccagagctacggcagttcctgacccggcccgccctgactcttctcaacaaactgaagcccccaaaagtactttggtggctctcaaagatgcattggtagtctctgacaggttgatcggagatatgtccttggagcgaagccgtattcgaagacacatcattcaacagcgcacagtgcttgatagccaaactgcgcacctttctgcaaccgatacccgaaccgagaagcttcagcttctttatgacagaacggtcaaattggggtcgacagccaacaactaaatggctgtcttacaacgtggctcggatattttgcaatcatagattcgatgtcattggagcgcgacggaaaaaggagcaacgcatcgtccatcacccctactacctaattccattgattggctgaggaagggatgcacgtcagcaacaacacagaaataaaattgagtcttgtcttttggtgccttgtaaatttcctcatacttacctcagtctctagtataactagttatggatcaccgctactatcttgcctaccggtgagagatgtatattgggtacctgcgtagtacaaaaatcgacatgaatttcattaagtggcacgatgaatcttagacttcagctggacctaggtaaactcagccctagcctaatctgtgttgaaggccctaaattggttataaaaaccatgtcacgctaattatgcgtacaattctgctgactttacagtttatgaacgccaagaccctaatttgggttgggcctgggtcggaggtattgatgtatgaatacttatagtcaactataactagttagggaaccttgaaatcatatgataatttgtcagcatatctgttcaaattccagtgtcgtcattcagcaagagagtagtagttacctgccagcaaatcgcccaactaaatcggcctagtgggtaaagatcagcagtgtctccccgatatctgaagtggacagccggctgcggccaatcgccccgcttatctaacgcgtggcctgcacctgggcaaccttggaaggcagcgaattttgttaacggaagattgtttcttttcttttcttctcttcttatcatttctcactgtgcgttgcttcagacctagcttggatttcactgttggctttctgcactcgctggacccggcgggattgttgtttcctcgtttcctcattgcttggcgcatacgacaccccatcaattagaccatccgcccaatatgcgcgacgattatactcaaaacgaccctggcggcttccaatcaagtcatgtgttgcacagtaagacagcagtgggcagtgcatacccgcctgcctacggagagtggagcggagaagctacaaatacatactccagatgggacccccgggaatggtccttgaagaagaagattttcctagcggccggcatcgtggtggtaatcgtggctgttgtcgttggctctgtcctaggagtgcgagccaatcggtaccccaattactcgaaactggattacagcttgaaagacgaattttcgggatcgaccttcttcgacaacttcgaatattttaccgccaccgacccaaccaatggatttgtccagtatgacctacaaaccaagcctatgccaagcagatcaactgacgtgtaattcaggtatatcgaccgagctgcatccgaatggcttaatctaacatacgcctcggacacctccgcggtgctcaaggtggacacgacatacagtggatcggaggctgctaatgggcgccaatctgtacgagtcacatctaacaatacctatgctgatgggcttttcatctttgacattatccacaccccgtacggatgtggaacatggccagccttgtggctgacagaccccagcaactggcccgagcacggagagatcgatgtagtggaagctaccaacgctggtacttttggaagccaatcgacgcttcacacgtcgaaaggctgcaccatgggcgttaaacggaaagaaagtggcactgtggataacgagaactgttactacgaggcgaatgactatgcgggctgcggcgtgaaaggcgcttcgagtacttatggtcccgagtttaacagcaatggtggcggagtaagtgatggtgtcccggactgttcatgcttccatcgaaaccaatttactaataaccacccctttcaggtctacgcgatggagctccgtgacgctggtattcgcgtctggcaatgggtccgctctaagatcccgtccgatatcacctcgggcagtcccgacccatccacctggggcaaagcacttgcggacttccccagcacggattgcaacatcggttctcatttcaagaaccagagtatcatcatcaatatctctttgtgtggtgacttggcgggcgcgaccaaatactacacgacacaaagtagttgccctggcaactgcacgacatttgtgcgggataatgcgactagtttcgacactgcgtactgggagtttggcggctttaaggtctatcaaacctcgtgaatttttgaattgcagagtgtgattcccctttaatgtgctcctgaattgatgtatgtgggtttcgatcactgccggggttttggtttgtgctttattttaagagggcggagttttcagggcagattgtgcaatcagaggagcttgagatctcatcatttaggtgatgatgaacaaactctctgtgtatttttcttcgtaatagaaggctaattagcagcaagaccaacgttatatatcttccttcgtgtctttgaagacactagagatccactgataatcattgcaccttgcctctcgagtcgacaggccagatctcctcaatgactccacctcgatgggcgtaatagaaatcgtgcaagtttacggtagggtcaatgtggctcggtaccatctcaacgcgatccccaaccgaaagcgccggggtcccttcttcccaactgagtgagccgtgctcgtcaccaagcacaccataagtgtacctcgggtccttacactccgccaagccactatccgtcgtcaacgatttcaacccgctgtcgattgtgaccgaccgaggaccttgtttgctcagaacagttgatagaatcgtaagactgttggagtagaaggtaccgacggcatttcggtaatcggtatccatgaaaataaacgatccaggctggagctcagtgacgcccggcactgtggcgcagaactccgccgttccagttcccccggtagtcaccacctcgatattgaagcctgccttccgcagcacgtccgcagtatttgtgaggatctccatagactgtagacattgactcttgcgatcttccctatcatgcaaatgctgcaaatgaccctcatacccgtggagcccgatcagtttcaaatgcttcagaccctgcacatgccgtgctagagtcatggctgggtcacccggtagaacaccagtgcgatgaagcccaacatcgagatcaatcaaaaccgagataggttcgtcgataccggccgtcgccaaagcctcgtcaatagccgttgcgccggcttcactgtcaatcactatcctgattttgcggtgtttgcggtacagttccaccagccgttgtacctttgcagggccgataatctcacacgtgataaaaaggtcgtcgaatcctgccgcggcgatgacttctgcctcgctgactttggctacgcagcctccctttgcgcccgctttgaccatcttgttggctaggatcgcgctcttggtcgtttttagatgggggcggatgtcgaggccagttggtagtagcttgtccattagctttttgatgttggcttcgacgagatcgagatctgcgatcatggatggtgtatcgagggtatcgacccggtcgccgactttgggggaatacatgttgatttcgaagtcgagggtctagatgaggttcgaagccagttatgtgctggtggtcagtgtctgggtttgaagcttgacaaggggtgtcgctttataagttggctggagaatgcaagggataaatatgtgcccgtgctgttccataatggaccccgcactaaagatgggcattcgtgcggggtaagaaaatatagattagagaagaaagtgcactaaattgatgtatcccagaggattttgtttctaaaatattcattctttacctaagcatatccagctaagttgaggcatcttctagatccatgtcctttttgtatcagcaagttaccgcataatgtcctaatcgagatgttttttatatcgactaaggtttaagctaaacattacagtaccatggatcggcttagactagtcccgattcaatcgcagctgccatccatagatctgttccgcgccgtcgactatagaactgaaatctgagaggaattggctctttgcttctactcttttatcaaacatcccctggcttttctttgacaccctgtctatgacactattgaggattcctggactaaaccttcacgcatttatcatattgtagagtaagttctgagtgagattttctgatgaattgagctagtagtacggagtagagttaagataacaaatatcattaaatgcgaaggactaagaaaataaattgtatacatgatgtagaacgagcgtcctgatactcttcgcagggctaccggttacttgaccaattcgctgcagtggccgcggtcttggatcgtaggtgtgtcagatagactaggtagtcttggtggccgttttcttaaccttcgggacgcgcacccaccagtacagtgcacatgccgcaaagatattgaagacgatgaacacccacataatgccgaagttgcgccacacatctgagtaattggatgagacagaagtaaggtacacgtttgtgtcgctgatggggcagaagttgcagtttgaggttgcgagttcgtgttcgacgtagccgcccatggtggacttgtatgcttccatgtactcgccgcaggtaccgttcagcgggtcgaagtgcaggtactcgtttgtcgcacatatgactttcgtgttagagatgccgacggacagcataccgctgacgaggtacgtaaatggcgagacgcggtacatgaaattccagaaacctgggagctgtgcgggagtagcaaggacaccgcagaataggaggcagagcatgaagagcatgttgcccgtgttaccggcattctcggcggtttcgaaagccgcgatcatgaagtgtgcaaaggtagacgagaagagaagaaaggtccagatgaagagccacatttgcgcgccgcggagcgtgacggaatcagtgggctcggcgttgcggtacataccgacagggtagtaccagcaaacgaatataatgagagacatgagcgtgttccaggggagttcaacaacaatattcgatatcatgaaagctttccaagagtaagctttagatggacgttcgcggacctcgtacaaactgcgctgggcaacgaaatgtggcatgatttgctggatgagctgaccaaagagagtcaataacataaagatagcgaacatctggttctgaagcccctgcatcgtgttgggggtattgtataaagagaaaccgacaaagagagccgagctgccgcatagtgcagtcttggagtagatgtatgtgggtgagcgccagatttgctggaatactcgggtctggacttcacagagttgttcgtagaaaggagcggcgaattcgcggtagctggccttgtcctcgcgcttacccaagacagtgtgggcagggttgacaagctgggagcgttcaaatttcagttcggtgagatgtttttggacatgtgcatgttcgggggacttgcgccatgtctcgtaccagtcgatatcagtgtggaatccaggagcggcaccgataacgtcgagcatccattccgcggggttagcggtaggagggcacgggggaccaccgttgcggacgaaatagtcaataagaatttgcgagttctcgccaatatctccatagtacacggtgcgaccaccggcctgcaggaagaggagtcgatcaaatcgctggaatagcatagcagagggttgatggatagtacacagaatagcctgaccgttctttttcagtttatcaaggagatcaaggatagcccatgatgtctgagaatcaagtccagaggtaggttcgtctaaaaagagaagtagagctggcctggcggcaagctctacaccgattgtgagtcgtttacgttgttcgacattgagaccctcaccaggtacaccaataacggcatcagcatactcggtcatttctaggagcttgataacttctgtgacatagtcgaccttctcttgacgaggaacgtgagcgggctggcgtagaagagcagagaaggtaagggcctcgcgaactgtgctggtgttcaaatgcagatcttgttgttgagcgtagccggtcttgcgctggaaggagttattgcggggtttgccatcgacaaggatctctccagtgataacacccatagtggtgcgggtagctagggcatccaatagtgtggtctttccggcaccagagacacccatcagtgcagtcaaggtacccggtttgacccatccatcaacatgatcaagaatcctgcgatggtcctttccaatcttaatatcgtagcaaacatctttccactggaagatagcagtctggcgttcgatgatggcaatgccgtccgattgggtcttcacagcaatgctgcggctactaccgccttcgacatcgtcctctgacttgctcttcttcagggccttgtgcccgcgacggaagactaggatctcgcccttcgacttcttttcggtgatgaactcggtagcaatcagatagacaaccatcagggcgaacatgaaggcaaatataatgccgatgttcctccacttgtgcgaggcggtatagccataagccgactcaatgtagtcgtcgccattgacgtagggctgcccaggcactgatccaactgtggagcaaacacggttgtgagttccgacatccgtgtagccaggacctgacgggacgtagttgacacagatgaagtcgcggttgtggaactcattgatcattagagactcaaagccatagctgatgggattgatataggcgatccagcgggcccatccaagcatgtagtgtaccggaatggtgaatccggtgtacatggcgagacccagaattagaatcgcagcgggggccagggcttgaacgagggatcttgtcaatgatgcaatggaccggaagaacatagacatcgttagagtcaggacgaatgaggtgaatacaaagaaaaagaaggcaccaggttcacgcctcaggtttgtcatgaagtagagaaccaaattgtaagtgatagcgttgaggaccttatagggcaaatccatcaacatagatgcaaatgcttcggcggacgggtggtagagggcatatcgagagtgtttctccacaattgcccgttgagcataaagagtgagcatttcaaggccggaaccaaacgcattcatgagaacagcaaagaagaggagagcaccgcgctggaagaagctgttggtatcggccttgaggttgtaaaatatactggcgatgatgagagccatgatggaatttccaattaacgaagaaactgtgatactaggatcaccttttaatcgttgaaaactgcgccataagcacaatttaacctgttgcacgtatgaaagagtgtagggtgacgatacatgctgggccttggcttgctgagctctccgagattgcttgaacttgtccaggtattcaccaccgagtgcaaactttgcattatacatctcaatgtcttgcacgagctgtgctcgttctgctgaggccttccatcttgccgcgaactcatcgggcgtccgggggacgcggtattcataccctggctgcacgacacgctcgagatggctagtcatagaagtgaggaaatcggcgtcagtttgtcggttagggcagatgaaacccatgtcaaggaagtacttcttagccgcggtcgtgcgaccaaagtagatctggcgaccttcgtaaagaacgaggaccttgtcgaagtggtcgtaggcagcctggggagcttggtaaagggaaacacaggccgtggcgccgttgatgtcagtctgcatgcgtagagtcttgcagaattcgacagcatttgcactatcaagaccacgagtggagttgtcccaacattgcagcggcgccatgctaaggcaggcttcggcaatactgacacgcttgcgctctccaccggatataccgcggatgaagtcgtttcccacgatggtatttttggtgtgactgataccgaagatggccataatgacgtctcgcatatgcgtggcatactggttcacagttgctcctccgggaatgtggcgtggcgctcgggcccgggcagcaaagaagagagtgtctccaaccgtgagcttagggaagtggacgtcgacctcagcggtgtagatggcttctcccctaaactcggtggacatttgctttgcgctcacacctgacgactattagcaggaagccttcacgtggatgacgtcggacgtaccttggaaattgatcttcgagttcttgtcgacaaaaaagccgtgtgtctctccagcgatggtcttcaagaaagtcgagcatcccgatccaggtggtccaagaaccacaagcatctctccagcctccaccaagccatccaagctctgcagaatttcgattttgcgttgatgttggcctgtgaccttcctcgccagactgaaagtctctaaccagacgttgccaacgctcttctgataatcggtatcggaaccgaaaccgtgcacattcaggttgctgaaggctatacccagtgtccggagtggatgcgcttgtttgtcctcggtctgcatctgtagcatggccgtgcaccaagcccgggcatggaagtgttccccattggggtccagggtcgatccaggctccgctgaaaaggggttctcgccagtcgttgaaaacgttttctgctctgtgaattctctggccagttggtgaacctcggcctccctcttctccacactggggacgtcgtccttcacactttcggtctcgcggtcgccattggccacgaatttgcccaagctcatgtttgcgggtgttctggttcgacaccaataagcgtcaatcgaatatatcgactatagtaaagaaagaaggactgaagtttcggtatcaattgctaggagcagaagattcatatataaagctgcacattgccctaggcattcttcgctctcagtttggactgaaggcatggataacgtgatccacgcaaacaaggcctggaggcgttttgcgaacatttttggtccgtgtcatgcaaacaaaggtttacctcagccaagatcgatggctcacatcagccacctgggcagatcaatgggtcacgtcagccaaaccaatcaaagatcacatcagccagaacaatctcggccccggggaagcgctattggccacatccacattgatctagtttagatttaaagccaaagcgggattgagccgtttcgggccagggatcgacgtaaccctgtccagccctagagtggtctggtctgcccacccacccaccttgctcttgcttctggcattgccgtggatttcgagcttttatcgcaaggaaacctagatcccatctacttcctacaccccgcaattccgtattcagccagagatcgaagcagcaatggtgaacctccaaaccattcaagcccataatgcgactctcaaatcactagccccaggtctcgtcgcggtgttcggtaagttcaacctgctccaacattttagtctttacgatgctcccgaagcaaatagcccgatccaaaggctctgctctaccccattccctctcttgggaattccatctcactaataccctccagtcggcggcacctccggcatctccctctccacggccctcgccttggctcgtcacaccctctctcccaaaatctacctcatcggccgcagccagtccgccgccgacgacgccatcgcctccatgaagaccataaacccctccgcccaaccgacctttctccagaccgacatatccctcctcaaaaacgtcgacagcgtgtgcgacgagatcgcagctaaagaaaacaagctaaacctgctctttatgacaccagggtatatgacgctgaaaggccgggatgagacggcggaaggcttggaccgcaaattcgtgctgcattactacgcacggatgcgattcgtcaccaagttgctccccctcttgaccgcagccgcagaagacccatctgtcaacgccaacgccagactatcccgcgtagtctccgtcctagacccacaggtctccgtccgcgccggcggctcaggtaggctcgacttctcagacctcagtctcaagcacacctttagcctccagacgtgccaagcgcacgccagcctaatgggcgattttttcctagagggaatggcgcagcgacacccgcatactagctttgtccacgcgtacccctctggcgtggccacaggtctgatgcgtgaactgccggttggacgcgtgctgtcgtctgtgctagggacgctgttgagtccatttatagttccgattcaggagagtggggagaggcatttgtttgcggcaacgagtgggagatttccaccgaaagccgagggggcgaagatggagggggatgtcgcggttggcagtgatgggacgaaggggagtggttgttactgggtgaattgggacggggaggtgttcccggcgaacaagaaattagggaggacgaggggggagggcgcggtggagaaggtgttgcagcataccgacgacgcgtttaagcaggtgtgcgaggatggcaagacatacgtgtgaaatgtcatcgagggaagaagtacggagtaatagacgaagaaatagacgtgtgatacctaggtagggcggagtggtcaaataccgggcttattcatcaattttctcatttatacggtattggtgttgtaacagcgtatttgtatagatcgagaggcatgcggctgccgaccttgaagaagtcggtgcgttcagggcccaggaagactggcgccgcttggttggcccctagagaatcctttcaggggtggcttgggcccacagtttagtttcataactgtcgcagtaccggaatgtctcccggttggagattaccagttatgcgcttgaatttggtttcatccatgacggtaagtgctcgttgtctctggtatgtgggatatcccgaatgagtctaattcactgcagatatcatcgataaagaaatccaagacgcaaacctggaggaggtagagcaggccttggaaaaaggcggacagactagcaagatcgaagagaaaggtggctcctctggaaagcgtagaatcgttgcccagattctccgcgagatgatggcaatcgaccccgagagagcaacggttgtcaccaagagctgggccgctggtgttcaacattcgagtacccggcaggatgacaagcaattcaatactctcgaggagtacatcccgtacaggtgctttgatgtgggatacgggtaagtctcctgcacccaccaacgaccttagcatcctaggtcaaacctctatccgatactaattttatcctgctatcaaggctctggcacggccttgtcgcgttgagctgcgctattaccatccccgaggaagaggccgatgaggcgagggagcttctcatgcctgctggaaattctagcctgcataagtgcatatgcatggtatgcagtttatttccttatactatgaggttccacggggtcgagattcttagtgagcgccgccacccttgtattattgcgggcttggttgttgtcaattgtccgcatttctacttaatgtagccgctatcaataagctgatggccctggtcgtgccgtaaaagtctgtatgctcggtctggtatgctgatatcacgcgccgccagcctgaagcctatcaacgacccgaaattatatttctaattatatttctagctgtggacttatttccggcgtgtcttcccctctggtactgcgccaccactcactttgccgcacaagttctccatcttcaccacctagcagagtccaatactttttcaaaaaccacacccttgcctcccagctgcggacgtcccacggcgtacctgtcgaaacatatccagtggagttatttcgatccttcttcccaatgcctgcacctccccagcatactaaaccgttcagcatgtcgtggaagaagttatcctcgtcaacctcttcctgatgggcgatgagaccttttcgtagtgtcgggaaaggtagaatatctatgtatggatgatgcttgacagtgatttgttcgctgctcggcctcaagtccggcttcagtgtcttgaatgttctcttcactgtgcaaatcatatttgctttggccatatcatccgctgactccgtgctagactggaagaatggcgagagagattcttcggcacagagcgtctcctcggtaatgccaacatgtattccaagagtactcagtgcagctatagtgcagactgtttcgatgcgaaggttgttggcatatggatctgctgcaggtgcactcgatccgaatctgagtatcctaacctccccacagctgaaggggcctgctggaccttctgtccgtatctggaagtgtgggctggaacagccgcagtcgatgttggtcgtccagtatagaccaagggcgtcattttgtttatcacaaatgagaagagaaggatcaacatgtgttgtagaatcccatacgctcagtgacggtggtgtgccgtctgactgcgaaacatgcgttggagaatcccatatactcagtgatgatggggaggtatctgcctgtggacaatatgttgtaaagtcccatacactcggtgctgatagggtgtcatttgactgtggagtaaagtattggcattctctcgaagtcgccgtagatggactggaagtagatatatcccaagtatcataagctgggaggctctttgcaatatgggttggagcagtggttgagctaatcgttgcgaccgcctcggatgggcctgtacccgcagctggtgttctttcagtagcacggcccggcgtagcagatgctgcaagtgcttcgagactctctaggcgctcacgaaacttttctcctagacgaaggattagtattcctttttctggggatccctgtacccatgatccgtatgttgccggcatgcctatgccagagaagacctgtactcacggtactttctttgtgcttgagcgttctgctgccgtctcttctctgggtcacggcggacaggcttccgtttcgcctttcccacgctatcactctgcagtgttccttctcgagtctgaaatggcatcgtgtaaaatgttgggaagatgtcaaagatgtggctagaaccgttgcggcacagctgctgtggggaccatggctgacgtgagccacatattttcgcccggctccacgattggctcttcttaagtactgccccactttatttgtcccacagagatcggagcagccgaagctatgcctaacatagtaatattgatgccttagaatcctgctggaccccagaatgcaggattttgacagtgctcttccaaatccgtctacttctatgctttacatcctgaatattgagatcaaagatcccgaaattagttggaaggatattttagaagcgtcttaattgcctatattaatctcatattttttattgattttatatggttaatgaaaagtatatgaaggtgacggtcctcctctggagactgggacttcatcatttggagatggttcttaccctcaagggcgacttttaggtcatgtgacgcgtaacaactattgatcctatcaggctaagcccagttgggaaaccggaaaacatcggcaaatgggaattctggtttactcgtgaaaaagaaaggagcggtctcttgatatggctaagaattggcaagaaagcaggttaccggaataaggtattttcgaggcatttttgattgagtcaatgtctgtcagctatccaacgtggagcgatggaagtcggttgatgccctttcaagcgtatctgaggtggttctcaaaaatttgggaagtgaggttaccatcaaagatagttgatatcaatggttaagtcatagctaggtgagagtatatatatgatttatgtgtgatttccggtgaagggacagcccaatagatttctcttaacctaggatctgccatcccttgtagtgcaatgaagaaaaagcattgtcgcagtgttgcactgagtgcctgcccaccatgaaacgcctcatcgtacctaatcactggtgaatattcaagaccagtgacttccaacatctacttcccggacaaaaattgtctcatcgtatgttgtcaggaacgcatacttgaggtccagctcacgcatttgaccggctaattgccctgtccgttatatgaatgttagccttagaacgtatcgagcttgggggattaagtgataacacgaacctaggtagcgcctctcttcgccgtccccgaaagtaagaatagccgtagccagtatgttcacactcagacaatcccacggcgtctttgcctctccgatgaccttgatggctttgtatgaatcaaggataatgaagtccggaacacctctgaaggctgttgctagggttgtctttgttgggacgctcagggagtggagagagagaagacttttgcagttggaggtaatagtagtaagatactgctgggatagtgattttattaatggtataacgggatctgaaggcgatttgatataaggcgagagtataaggggatccggggacgatacaatagccaacgcctgctctgtagctgcacgttgtctagaacgctctctctttttggcatcccgataagattgatactgatcggtctctcggttgctggcgcgtgagcaaaatagctctaaaggatgcgagtgaccgcatctagtatatattttgaaagctacaatgatagagaaagtagatgcttagacagagatatgctctgcttatatgctctttgtctgaaagaaaaactagatgctttatctgacatatctgctctgcctgtatgctcaatgcctgaatgatcattatgcacccatagagatcatggtcacatgacacatacctaagatgctcctctttactccccaatcaaacaggacaaacagggcattcaacagcctcatttcccacaattgtgataaatctgcctatggatcgacaagccacagaaaattggagacgagtttcatcttttacctgcaagtcaaatagtcatcatagattctgctcgtaaaaggagcctttgatatgggaatgtacagagtcttcctgtcaacctcggcagttaccaccggctccactcacacggacgtctggactccacaaccggccccgccacgaagggaccgaatccccacaaggacaacgccatggaaatcggaccggaaccgaacaagaagaggctagctctgagtcggtgtcggaagataaatagatggaaatggtggtgtgatgagttgagaaggggctagaatggcagggaataagttttattcaaaccttatggaagaactttttacgctattcgtaggtgaaaggctaggctgagcagtcgatgggctagtcatgcgaataaaatgagcgacatggttagttttttatcgcagaggaatatagggctggcgtccaagcacaactagacagagcattactatctgtattgatgcaacgagattgaggccacagagggcgaatatctcgcttacatcggttggtccgttatagctaggtttgctagtcgaatagtttgtttatttattatctcaccgaggttgggctactgtcatgagtcacaagccaagatacaaattatggttcaatggcttactgatgataagaaattaatttattgaagctagaggaccgcgaataaaaggtgtagaggaaaaaaaacccggatcagattagaataatctatggtatgtggtgttcgggcgtggttgcttttggttggttcgctttcagacattcactagattcagctgagaggactatccagatagacgagttggttgtacattgaatttgatcaatttgaagaattaacctcggctttggcttagcaggatgaaatactatacaacacgcatccatcgttgatttttggcatcatgtacgaataggaaatataacaagctgaaccaagtatgattagatatagaactttgaaagccatataaacataagaacgttaatcattactgggactaacacatgaacagccgcacacttcccctctcgcacctattatttagaagacagccccatcccaaatcaccgaattttgcgtagcccaatcggaacattatcgtcgactttattttgaggtgcgtcatcattccagtccacattccgggtggaagccttttgccggaagaagcgatacttctgcaaaagccttctatagaagaagagtaaggcaactccaataaccaatccagccacagagccaacgacaatacccacaatagctcctcctgaaagaccagagcttttttcactcgtggtagccgagttcttcgttgtgcccgacgccgcagtagcagtagacccagatgcagcggtcgtggtagtagtcacatcggtgaactcatcacttgtcacattgaagcaagggacctggtaggtgaatttgctcgcagcgacgtatgtgatgtctgcacacgcgtagtaggtttcgtttttgtcggtatcaaaatccgaggtgtatttgatctggaaggtggcgttcgttccctcttctatgtcgatcgatgggttggggacggagtagcattcgtgtcccggcttaatgtcgctaagagtagagccattaatgaagggctcaaagtcatcattggtacttgggtctaagggaaggtcagtctggatagataggattgatgaagttagcttactgctcttgtgagagatagcaacctgcattttccatgactcgtcttggagtacaagtgcgagcttgccgttgactacaatgtcttgtcagtatgtccctttttgtggatagtgaggctcttactaagtgggaagttcgttcggttcacgggtcctgttgatgagccgcatggggcgttgttgtcatacgctgcaccccagagacgatcgggtggccacaggaaggcagccgggcccatctctttgctcgctgcgtcgccatgggcacacaacccaaccgcggagaaagcgagtagtgcgaggtagctcttcattataccgagagggtatgctagcagaaatatatttgtagaaaagaatcttgaagggaaacacggaaaaacgagacatcgccgtttataaacatccagtcatcctcgactgcatgacaatctagagtagatgagtatcggcttgggccgactccgctgccacgaggttgacaaattgccaagtgtaccaagtgcttggcaaccatagtttcctgcaagttacgtccgggaatcttctcaccggagttggaccactgatatggatccattcaggccgagtcacaagccaaaagccacaagccaagatacaacttacggttcgatggcttgcatatgataagaaattaatttattgaagttcgaggagcccgccggataaaaggtctagcggaaaaatcatacctacgacccggatctgattagattaatcagataagatgggtgggtcttctccggctaatttggctgattttcggagctcgcttacacatactctcaggatggcctgggttcatttgagacattgctctaacgggtattctcagccggaatagctcttggttctccgagcgtacgtaccactagatagttctcgctccgaaaagaccattctgccaagcatcgtatcgttcttggggggacatccgcaggtaaataagtagacactgaactgccgtcacttgaggtatacatcttctgtctctacaattccaaatacaaacttcatacctcatttcactcgttgatatcatcatgcgtcttgttaacctcgctgctcttgcctgcgctgtgatcagtgccagcgcattcgacttcccggaatttgtccctctgcaccggcgtcaggaggccggcactccagcatatgagtgccacgccaactgcggtatgttccatatcctctatgcaaatcatgactcggactaacaggatcaggcggcgtgattgtcgatggccgtactgacgggtactgtgataccgatgaattcacgaccgagttggccgcttgcttggaatgtgcccttgagtatgacatttggcaatactacggaacctccgtgtcaaaggccgctactgcttgtggattggacgctaccccggtcgaagcatcttctaccactacatcggctagtgcaaccactgcatcggatagtgagaccactacatccgacagtgctagcgctactgagactgcggagagtgtcacttccgctgagagcactgctgcggcgaccacctctgctagtacttcgatcgcgacaacttccgtgagccccccgcgtgtttctggttctcctcgcccgtcgtcattgattccttcggccacacccactggaagctcggttggtttctcttctactcaactatggacttatagctaacttgacacagactgcttctagcactccttcctcgacccccgtctacactggtggtgctacgattaatatgggcagcggactggtgtctggtgctgttgtcggttgtctccttgcagctttcctgtaaatagtggtggtgtatagtaatacttgatggagcgaaggaaggtgtgagaaagattggtggatgctgtatattcaattctctcttgtgacaggccttgaacctgtctactgcactattgcagcaagaatcctttattaagactcgaaattaacgttctaatctaagagtctcagattgtaagcagtattttcttgaaaaaatagtcccaaacttgaagcaccgacatcaaacatacgatcaaatcccagaatgactaagacgagcgactgaaaatcatcatgatacgtaatataccactaactgcgacgatgtaaccaactcgcgacttttttagaagtccccaattcgtttttttgactaagtttggtattgatataaccttcccagtatacttaggtacacatcgttcatcctgcgagctaactaataccgatggaccgttatgaattcatctcatcactcttcccatctagtgagttaaggtctgtttccaaatctaacccacagccaaattgaactgccctttaccttcagtaacttcgaactgccacgacttcccatcatacttctgtctctttttcacggtcacggggaacattccctcaaccggacacatgttggatatggttgccgaatttactttcggtggcgcattccagagcctatcgaccgaagtaacatcgtatcgtaaggcagtcatggctactagtgccaagatctcactagtggcaaagtggcgccctgggcagattgagggagaaacaccgaatgccataaacgcgccggtgcgccggggctcctttttcttgccaccattattcccggttgttgtagtggatctcatgaaccttcgttcgttgaactcgtcagccgaatttccccaagcgctctgatctcggcccaattccttcactggcatgaagagcatggttccagaacggagaaaatatttgtccgcgaggacaacatcctgtgtcacgaaccggacggccaccattgttgaccttgtccggaggacttcttggtacaccgagaggagaagtgggcaatcgcgaaagtaccgcacataaatgatatgcgtaccgtcgggtgcggtcttgagggtgttctgctctacctcttcgcgtatctcttcgagcaattgtggtctcgagaaaagctcaaagtgaacccagaatgcagcaggaacggtatttgccagtaatcctacaatcaggggcatttccgcgtatgctatttcttcatgagtaagtccagcccccaggaatgacctatatcgcatggctactagctccgagccgtcttcatgactgccaaggtcgaaataagttttgaacgcagcacacaaagtcttgcgtgccttccaggtcttaggggcaagtatccatggcaaaatgctggacagtagtagggccacattacgttcgaattccctgcccgggtatttgaaaggttttgtagcaagttataggtaggataaactcaccagaatgtgtcttcaatgtgtctaatttttgaatggattcgaatttccatatgttgcatttgtgctgacactagtaatggtatgccgaagccaagcattcaaatcaacagtctcatagttgcccatgtcatcaatgatgggaagtaggtactgaagcattatcctgttaattctgtcaagggatctccccgcaaggacgggtccagtatcatgcacaattttagaaaggatgctcgaaccatagctttgatcacataaatggaccagcttattgcgcggagtttgacatagctgcttctgtgtgaacttcactaacggttccaacgtaatggccgttgggtgtttttgagcagcacgcatgatggcaggtgatgaagtcaaaaagagcctgaaggaaaatatattaaccccgaatattggttgatcgcgatatttttcgctgtcgaatatgctgggttagttcaaactgtacaaataatatgatcgatgactcaccacaacatgctaagatatcctgagccatgttggatgaggccaatcagatggcccacaagcggaatcgtactcgataccgagggaggctcgcgcctttgaccgtgaaacgaagtatacgatgaggatagaaccacaaccaatactacaccgataatcgccagatcatcaaagtctaacatggccaagttagttcacgatgtttgagtgaagcagagtttagggaattgtcggtgagaggtaagtgaggcaagaagcagcgctgagagtttgtgattgcccacgtcaaggccttggagtctcccaaagaggtagttgctgaccagacgacgtttcataaaataggaaaagtacatgttttcaactgagattggctaaccctcccgtcgatcgaccttcattaatttcgtgccttatacattctatttgatgctattacttagataaagttgcgtctggtaagtttatttgtactaccagtccacataaatcaccaagacgtcccagtcctctaggaaattctatgctaatgcgcatgtttagagaatcagatttgaaatggtttgttaaccaaagtgaggctaacagtacgatcggagagtgacgtggcacaccgtgacacgcatgagatagtagcccccactccctcgtttcgaacgtttggtaaaaggatagtttcagaatatatcggcgtggtagttatttttgctttggcataacaaagttatcgttgaatttgactactgagcttgtacgtcaacgccaggggtcatagatgcaagtatatctgcgagtcccgcatatcaccttgatcaaaaatctctttggccacttctcttgccttaataataataatgcaaaatgtttgctttctaggaggcgaatcatatctcaagttatcaattatctctgacgtttcatgcggtagacattgcaaatagtacagcgcatattgccactggaccataacaaagaccaaggttcccatttagggtccacaggggtcatgactgttgtctccacattaccccgcctagactaagtcagatagataaagaagataaagaccaggttgatttgactctttccttcaaagtctcttcgcagagatatttgatcaattatacattctcaatatggggggagagaccctacaagtgaagcgttcccttctgtgggagagggctctgaagaactatcatcaagatcttgccggtgataaggaattggtcaagatactcaagactagcagcctcgaggagcttcttgcggatatccccattctacggccagttaactcgtcggaaaggccactgccctgcactatggatcgactggagccaacattcaaactgttgaatgatttcttagagatactaagaaagtcatgcggcgcggagtcggcgcaaacagcgctagtatggggcagtatacgaatgattgtcacggtgggcttccttcatgagagcctacacactcttatttgaggctgactagtgtgcagctggcatctaccacagacaaaattttgcaagaagtcttcgatatgattgaagagctggccttgacaataccacatctggagtcctgcaaaatcactgtctcaatgaccacggatatggagacggcactgttgagtctttaccaagagtttatctgtttctatgcccgcactatccgtttctttcggaatttcagacaacgtaagtattgcgttctcagactcaatccggtcttcgtactaatttgagccagcgtttatgatgcgcagctcatggcccaccctccagggcgattttcaacgaacgatccaacgagttaagcgcctatctaacaatatcgagcgcgagattgagctcagtagaatgcgactcgataaccagaaataccatgtggtcctcgatttcatggcgaggttcaaatcccagtttccgaaaaatggcgatcaagtttcccaccatcttcctttcgtggaatgctcccatttctatggtagagatgatattctttgccaaatagatgaagcgctatttgtgcaaccctctgcccgctcacttcgatccttcgcgttatatggcatgggaggagtcggaaagacacagatcgcattgaagtacgccaacgcatcgcgtgaaaagttcgataatattttctggatttcagcccagaattcgataacaattgggcaaagctttcgaaatatttcaaaggtactcggtttgattgaactagacacagagctggacgaccatgccaccattctcaaagtcaaggactggctatcatccgcaagtaagctacggacacccagccctgatgggccaaaatattgaaaactaacgaacaaaaatatagagaccagctggctccttatatacgacaaccttaatgacttgagcttgatcaagcatgcttggccggcaggatatggagggtccgtcctagttaccagtcgagactcaagtgcggccttgtatcccgcctcgtcgggatgtcaagtacacgctttcgatacggataatgggaccgccgcattgctccacctactcggattggactcggagtctacatcttatcaagccgaagctaagctaatcacttcagagcttggaggtctgcctctggcgctgagccagattggcggatttatcgcccaacggcaaatgtccctgaagagttttctcggcttctacgaccgaaattcaactactgtcgatgctgagcgtccagaaagtatggattgcagtcaaacacttgcaagtgtgtgggaaatggcgctgagcggcctttcccggaatgctaaggtcctgatcatgattctatcattcctagacctcaatggtataaatgagacagatctgagaaacggcacggttctagcaaatgacgcagccgtgaggttcatgatggatgagatagagtatgtacgtggaatcctcatggataacactactaaccttaccgttagctttttagatgcccagagagacctcctccaaaggtctctcatagacaagtccagcgaaagtggagttatttccatgcatcgggttgttcagcgtgtcgtcatccgtcgaatgagcgacgaagagcgagacaaaacctttttgctcgctatagccatcgtttccgcaaacttcccagatacatacagcgcagatatcggtcaccagattgcatcctggaacgattgcaagaagaacctgacccacattgagagcattgtgagcaaagggactgagttcaagatctttgaaggggagaatcaaccgtttgcggaacttctgctccgctgttcctggtatgtttcaatattataatctcaaacattaattctctaaccaaagacaggtatctgtatgagacggagaattacagtctcgctcgttcgtatgtcgacatcgctctgcagaaatttgtggacaaagattctcttgcgtatgccagtgcagtggatcttggaggtttaatcgatgttgacatttgccatccatcggccgcgctggaggccttcgaaaaagcatacgcactacgcacatcaattcttccgagcgatgacttgtttctggctgccagccaggtcaatttaggacttgctctcactgagattggcgagtttgaaaaggctctcggctatctccaacagtcaatcgatatccggctcatgcacaacagtgacaggattggtaactcttacagtaacttggccagtttactgttgagaatgggaaagcccgacgatgccgaagctatactgaagagctgcccatcattgaaggacttttcagatgagacatttctccaaaccgggaatcctaggttctccgggtaagttctcctgtgaaggcccgaaatatatgactaacatcatgcagagatatggtattactgagcaggataaggaacgcccaagggcttcatgacgaggcactcaagtttgcatgcaaggccttagatttccgaagggaatgctccaaggagcggctcaaagtctgtgactcgctttatcaagtgtcggttcttcggcacaaaataggcgagttggagcttgctcagtaagtacaagccaatacacagcaaatgactataaatgctgacatatttcctcagacaactacttcaagagtgtatcatgatatctgaagcccttccccacgccgagggcctaggacatctcgcacgggcaagctacaagatatcgcaagttctggcagaccttggaaaacccgaggaaagtacattttatcttgagaaggcgatcgatatacgaggagagttcatgaagttggatggagactacgttgttgtgaacggaggtgcctcggatttcgaacgtctggtcccctggatgctgtggtgatctacatccgagtccaaatatgtatgcatgtcacccatgactcgaatagcgaggaatattcagaggggctggatcccacaacagatattctagcttgccgtgaattttacaaattgatcatctttgttgttcaaacttaggactttcaaaatatcatgtgacatgggactattaaggtgcgttggagggtgttcattctgggaaggcacgtgggtttggggtataaaaggacccctccccccaactcttcttctcttcttcttctcttcttcccatctctctgaccaccatctcaccgtagcccccacgagacagcgtaggcagagggtcccgtagcacatgctgcttcacctaccacgaggacatcaacattacaatgttgtggaagtccatgtaggtcagcaccacacatcaaaccgagctttctcgtggatgttcctgaagtcgtggctctcattgccacttgacgagtcctacggaatacatgaggggtgtaaatcttcgtagccgaagacgcgtaggtttgatttaattgtaagcacactggtcaccagagtagtcatggcaacggcaacccatttccacggtcttgttaagctgaccagcgaagctaggcgattgtcagtgacccaaatcaagaaaagcatcacgacatctgaagtcacaggtttgctccgacaattatgagatttgacgatagctggatggagaagccagttaaccatcgcttcttttcagtcctgggttgcatcaaaattgtatggccccaagcaccaacgcgagatgctgagattttgacaacgtctcggacgccgtccatgctctccctcagcttcgacgcctattttcgctctaatatattaacacaatatacaagccaagccatcaagccccctgactcgatctatacaacctgttcctcgagcgcagcctgctccgccaatgcttttaaagatctcttctctttttcaatcccattccgtcgctgagccgtgtcacacagttccagattcccacattcacattccccatccctgagccaccgataagtgatactccaccgtttcccgcgcggcctcatcgtcccatccgggaggggatcattttttcgcttcctaataccatgcgtccaatgtagcctcgagtcgccgctcatctgcatcatgctccgcggggtcaagtcgacctcgatgcgttcctcgccccggcggaatatcatcatcgccggtgcaccaagagataatgcgtagagctggtcatacggtccgtgtgcatctacatggggcgggatgcccgcgcctggaggatagtactgcagacagacctggtctggaggtcgctcctcagtttttgggatgagaggtttgagccactctgggaattccttgtatggaatctccgggtctatcccgaaagttttatagtcgaaggtgtagccgtagtggagtgatatccggccagggcggtcgggccattctagctcgttggcaaacaacgagatgagtcgttgctcgtgctcggcattgacaaagtcttcttgccagaaaatgccgtagggttcggtgggcaactcgcggaaattattccgatcttccatagccctttttgatcctgtcggaccttgaaggtgggaataaagtgcgtggaacctttctttgcacgtgtaattttcaaactctgattttggaatgtattaattaccggtatcaataccacacactgcatagactccaagcataatcttggaaattgtccaccataaagtgttttgagctgtattgaaaaattaccgaatccgccaagagcatcaacattggagaggtacttgtttgggattttcgacatacttgaattgaattcaatctagtatcgaagagtgttctcgatcatccggctttggccttgtatctccacagggaacgtcgattccggtaaaaggacaatgaggcaatccataagagcatcgacaaccaagaaattccttatttcagcccaatgtcccggcttaagcactccaaaattcgccaccagtccccctgaccctatactgcgactccctgctccaatcgacagagggaagaatagggcccggtagcgaggggacttctgaagggcgattctcccggtaactcgacatatcttgtagcgaaatccctggaatttgttaaccttcaggcgcgtcctactccattagggtatccactcacgtgaatacggttcaagccgacttgagacaaaaatgggtgtgctttcgcgtggcgatcgtcgtcgacgcatctgaaaagattctccatctccatctccatttgtatgcatgagaatgcccacgctgacaattccttcaacctcagaactgcctcctcatcgtgtattgcctgagacatcgttgtcgtccgagaatgagtgttgtaaaaggggccgagatatccagttgttcctttttgaaggtagaagatagttgtatagcatgggtgattattattaccgttataactgtagcgcttaacctgcgggttgaagataggtgtaggtagtgatgattgagatgagtaaagggaaagggaagagtaactaatttgcaatgaaattgaatccaagtactgctttttctttgtctgtactcgcatcatatacaagcaaaggccatgtattgacccgtgtctatccccggaaatttccgccttcttgtagcatgcggcatatccccgcctaatattatccatagtatactacttagtatctctaactcacttgttattggctccaacgaaccttcaaattggactgccaggcttcctgtggcaattaacatctatatgagacattgtaattcaggccagtctattctgaaattgactgcattaagagtcagagtgatttttcctcctccatagcaaacgccaacctgcccttactatgattctatcgtgattcaggaattgaaaagctcgaataattgatacatctccatattcatatactccgacccaacgagggacatctattcatatcaccatccaccaataaataggggcttcttgctggtttgaatggcgtcaatgcagccctgatatcgtttctttgtaatcatgcagagagccagaaatgaagctggtggcctgaggccagacaagctcctttgtttctgacggcacctacaccctcttctcctcacctcctcatctcctcttctcctcttctcaccttctcatcttctgctcttgtccatcaccagacaaaaatccagagttctctttccaatcttttccgcctctataattacatatatcattatcttgtcgatgaggttagctggcacatcttgctattcgctgaatgacggcccaaacggttagcctggtgagtctaccaaatgctagagtccttgatggatgcaaatctgataagaatgctgaacagtgtgcccctcaattatcgggctgttggggatgcatatgatggggccggcattttgatctgcgctagcgaggcgctgaacggggtaatcaggagccctccccggaggtctgccttctcctcctccgtatacgagacttctttacctcgaccatgagacctcttcccatcgaacttccatccgttactctttttgcgacctttgctttattttcgacggtcagctccttcctcgaaaaccacgcacaagtgatgtcgatccttcttcacttcacaacaagtggcgtcaacagtagccaccctcctatggctgggcctgttgcctccactgatcgccctacaactttcctccctcattggcgttgtcgtcagcgaccttgattcgatggcgaaaggtcgtcaaaccacagcagccatccaaagtattccgctacaatgccttctgcactacgaccgccaaacaaagcatattgaagcaacgaacaagtacggctaatgggcggtgatttacccgaggaggtattcttttcatcagtctcctagcacttcgcaagcaaggaagcaacatcttcagcatcaccgaggccaagaagggatctcggtacaaaggattggagaaaatcatgatacaggagacacgccagagaaaatcctttttttttgtgatatatgtaattatctatatttttcctgcaccggtcaacgaatcaggcatgggaacgttgcctatcatgacaaaaccaagaacggggtcataaagtgcccaaaaatgaagctgcacggtcttttgcacttgaaagaaccattttgagatcgaaatcattctctgctcctttcactgagcatttgagggggagattgagattcaccgtcgctcctaccgacagatagattgtcaacagtctgatgggctctcagcatagggcatgagtctcttctttgcctcccaaagtgagcagatttcgcaatatatctccgcgtggcagtgggcaactcatactaactctaccttgatatacagctagaataaacggccataacacatatccgcgcaaaggagatccttcaagccccctctacattcaatgtgggatcgtctaggaaagcttcttttgtaactcaccctctagggcatgtcgggagctcaagttcgctttcaacaagccatttggcaggtacttggaggccgtgaatctgtattccgccgactctggatgctgtatcatgtcttgacttgggtgcaagaagcgcttaagctcccgatatactttacaggtaggattgcgcatgaagtttccctggacgatctcttattcaacgtagggtgttgtggccttttttttttctataaccatgctattgtcatagccttgggtggcaggctctattgttgggtcgtcacccggtgggtgcagatcccactactagttagagtagctagttccgttcctcctcttctatcctcttctctctgtccattaccacttcaccagaatctcccttcttgtctttctcagacgagttcacctagaagtagatctctatcatatatcctgcaagttagtttattatcataaatttcaattgaaacaacggaaagctaccatcaaatggaactattgacagagcgtagttgaaagaatagcagagaaacagaatgaactagccaaacaaacctaacctaggatgtcatcaaaaactggctccagtctagcaagtgatgtcttgtacaatctgggtagaccagtatcctcaaacgtgaccgagctctgggccatatccgcaacagccctaccggacaagaatgccacaggcataccatggccattgaatcccgccgcgataaactgacccggtttaccgggaatactgccaacatgaggcaacgagtctgcactgtaccccatgactataagtgagatgaaggttagtagaaagaaaataagccatcgtatataaaagaatcgcacataccaccagcccagatatgtttgatctccgccctactatcctcccacccaaggaacgtgcgttgcatgtacccatcaaagtaatccgccgcaaccttaatcaacttcccatcatcggggttgttataccactcctcgcgatcatctttgaaaagatgcgacgccccgccgacaatgagcgacccgtcattccgggaaatctgataaatatatccctccggaccgattcggatacaatacgtaccaggcaattcctggtgaggcgcaccaggtgccgcagcgatctggctgcagatccccttgcagggaatgatagctttggaatactccggggctaaggcgctggtaaacgcgttggtcgcgaggataatcttgcgggcgttaatgacgccacgactggtagttaccggccaggatccatctgcgtttggcgtctctccgatttcagataccggtgtattggtctgcaagttcaggccgtgagaaacggcgatgcgaataagatgggaaacgagtttgtaaggccaaagatggcctgttgggaaactgaagcctcccttggcatctcggacatgcgctatcttaacgcagatatcgtcagaaataatgagagcggaaatggtagcctgaaagcccatatcgacttacatcctgggtctctgcttgagacaagtatttaacatcattcataaagtccagtccttggtcaaccagaaagtcgtagaaggctttcgccttcttaagctggtcttcatcaagatacatatcataagagcgggtaaaagtgagttcgcaatcaatgttctctttacggaccagctcttccataatcttcaagtgcgagatttcgaaccgcacgatctctgctgctgcttcgatgccatagcgttcggtgaacaaggccgttgctgaatagatatctggtctcaaatggccgcctatgcaaaaattgagtgagctggacttatatacataactcatactatgcgttatgtgtgggtcttaccattgcgcccggtggcaccggagcaaagttcccgagcctcaaccaacaccacgcgaggagctggattttgcgggttctctgcaagcaagcgataagcagccgaggctccgacatagccgccgccgataattaggatatcggcttcttttggtagttctgttgtagtttggtggttgtcgagtggatctggttgtgtccgccaaaatgattgggtataccccgctgctgggcgagggaagcatttttcgttggagttggatgacatgatgcctagatgtccgtagtttacgatgcgattcgaactccagggatatgcaaatgtgaatacaagtgcaatgcgaaaacaagaaaagtgggcgtccacgggtggtatagcaaagcgttatcggagttgggcgcgcagcctatcgcagagaccgaactatgcggggctgaaaacgaagctgattgtgcgactttgatctatagtattcttgaaactcatgatattgctaaatccctgctatgttcacctctgggaacctgctcggttcggattcgttgagctggcactatttctaggctgccgttgttgatcttcaaatgcctcgataacatcagggcagctcgattgggccttgcctgattgtctggccaaatattcagactctgttaatcgcgctttcagaagttgattccgagtcttggaatgcatagccgaatgcaagcttttggctaagccctgtcccggataggctattaagcccaaagcacctagagatgactcattagcataatcccgctagtggtgtaaatgtgcatcacaaacctgatgcagctttcgtgcccattccaatcgggccttgaacaaatcctctgattgcacccatgaaaccatctttctgggcaccttcgtagggctgtcggaagatatcagcgaatccagttgtgaacccattccgaaagttatctgaggccgcagcaactccagacttaaagtcccggatattgtcgtagtctttcacctcctcgccatagagcctgggaacagccctcaggccttcattcaccgctccaggtatgtctaccaaaacgcccttgtagtagtaggctatgatcctccccacgcttttggcggaacccccaattgcctttcccgcaactatccagtcttcatctgtctggttggttccgggagtacgtgagataccttcggatgggcttcgctcggattgatttgtaggctcgataactacaagctctggctggctctgctgatgggcacgagtgatctctttgtagggcctaataacgacgtcgcttgatgctgtgaggatatccttatacatgcctagcacagacgatgtgccgcccgtgataggatcccatcgccgggtcataatgaatatagtttttgtctcgtatctagttcgaaatgtgtattagtataggtatattgaataggatggttggatatatggtctcacgctttcaagtcccttgtatcaatgcgagaattctcaagcaagatccccgctgccattttcgacaaatttataggggtctttccgttctgttttaactgccaaacagccggctcggaatcaagaaactggcatttcattttatcgatcggtaagttgcgatggaaagatgcaacagccgcagagactccagcttcctcggtcatttcacgagcaagatcaccagctgctgttagggtatcaggatgcaggcagaaacggatagcttccgctagattttccgcgttcaaagtccggtgtggaatgggaattggtccaaccccacgggacgcgaccatgtttccccaaaatagctgactgggataagttagcaaagagataggaaaagcctgcaggaatgacatactctccaaagaatggtacaataagcgagggtcttccaaatcgtaaaccacatgctgtagtccctgctcctccatgatgtacaactgcagcgaccttctggaacagccattcgtgcggacagtcctcaaggtaaaagatctgatcgtccgattcttcttcgccgagcttactccagccacgggatataattgcacggccaccccaggacctgactgccttgacgagtgtggcagtcatggctaggggatcttcaatgacgatgctgccaaatccaatatacaccggcggaggcccgctttggagaaacgcagcaaggtctgcaggtggtgtgaagtccggaggagcgcggaagaagaagccacagacatcgatatgtgccggccagtctgttggtttaggcatcaatgtaggtgaccagcaatatgtgaatggtatcttcaaagtctctgctaaacggggaccttcggtgagcgatatagcttctaggtcgatggattttctccaatcattgataacatcgcccaagctgtttgaggtcagcctattgcatcaagtatagcagggatgtatctggttgttacccttgccatgtcagccattcgacaatcccgtaagaaagataattcgccatcttcggctctgtggttgaatatttcaaatttgccaagggatgtggaaatgatctcgtactggtccacggcatggtaaacatcatatgtagagggatgccaagtgcctgagcgcagtggatatgagcgaagcttggagggttcgcaataatagcatcggcgacaaagggcgttttcgtaacggagtcatcctcaatacaggaccgccagcatccctggagaatttcgcctaccatgacacgcttgcgttgaatgtcaccctcttgaatggatttcatctgtggtatcaagcctgggttcttcaccatgtatgccatcagctccgagggatctcccccgatagaataaaattctagaccagagtcgcgcacgaagctctcaaacacaccatgtgtcgctagtcgtacgcgatgtccatggcgctgaagctcgttgcctagtgcgacaaagggctggacgtcgcctcggctgccaacaacttggataacgatgttgagttcaaggccacattcaaaatcacccgacggctctggctgtggttgtaaatgctccgcatgtagaaatggtatcaactttgacacttccctgcccactttggagtcgagatcgatatcaattcgaccatcatcttcgcgaaattagcaagatattctcgcaaacaagacagcgatataagaccgctcttacccttgacttttgtcccgtcctgagtaaattggttgcgttcaagcgtagaaggccggcgcggtggttcttccatcgttgcagcccaatgacatcacacacgggagatctatccgatatagaatttcgtcaagaagaccgatttgacttaggtatttccaaaaccctgtgaaggatccaataatttcaaacagaaagcagtatatgaagaggagtaatcccaaaacaactgaagaccatggtacctaggtggttctgggccgcgtgggacgggtggaccctcgaccgttgatcccacgtgacgtcaaatataagccaatcataggctgttttacagaagctatatgacgtcattcctacaacgagcaaaaggtcaatactactaggaatttatgttcattctgtaagttgtagctttgtgttttgatttagggagcctgttcatctcttttaaaataacatatcctggtaatacccaaaaatcaaccctcttaaaagattagcatggcttgtacctttaccgtcaaagccaggttagtgggaactgaggattatgagtggagagctacgaaattggagtcagtgttaagaacatcccacactggtccatccagagtcaattgcacatcgacggcgcgcagaagattatccggagctgaagagcgtctggtacgctggcctcgaggcagctcctcctcggtagacatgatgattgccaaaccgttaacccgataaccttcactgaacgccggcgacaccagagaaggggcaatgcgcttggcatcgacagtaacatcaaaatcaactccagcgtatgtcttgcccctactccactgtgtagcaacgaggcaaccacgtgggactttctctttgaacctgatgtgacgtttgttgggctgtgcggcaacccattcaaactgctgcttgacttggttcatatcaaccgagtgaattgtatcatgaataagctgtgcaacctcccagagtgcgcctttttcgagtagttcatgggaggcggaagccgaggggcagtagacggcattcggaaagtagcgtgcgggaagcttcagacgagtggagtcgcgcatgtccatggttgtccaaaagctgcgaagtggctcaagcgatttggcatctggtgtgagtcccttgttacgcaaaacctgaagtcttgcttgataaatgcgttggtagagataggctgagatgagctcgaaccttgtgaacgaggtcggttcctgggcgttggggtcgattgcagcattcttgattgtaatcagctcttgaccttggaagcgcagaggataactgctgacagagggagggtctgcctcagatatgtccgtggcgttctcgtccagacaatagtccacaggtttgaaagcaagggctttctccttctggctggcggataggctgttcgttcctctaaaataagagaagatctcagggggagagatgagtgttggcggagaagagtcgcgcaattgtctgtagatctcagccagatcacgcacaagctgcataaacccagtggcatcgcagacctgatggtgaactcgaatacccagtgcaacccctccgcagccgaatcgagtgtgctggatggcgaaaataggattgtgggagacagcgcccattgttgaatgaaaaattggaagaactgcattcccagaatctggcagaaaagttaccaagatacgggctgaaaaagcagaaactgcaatactcgagagcctcctggggcactgcgcttcccaaagctcagcgccagcgcccaggctaccaatctctagagcctggctgactggattctgctgcagacggccagtcaaatgcgggtaatagtccaggaggtgcgatgcagccaccttcaagcgctcaatcgtaagaaaattgtcgcctacaaattttgctggttttctgtatacgaagatgccttcgatcgtcaacatagctggcacgatatggtccatcggtcctagactaaaaggggactcgagcgcggcgactgtggcctcattggcgcagttaagcgtgtgccgcgtagaaacgcggacttgatccagtggcatcgctgtgattggacgaagcagagacaggatagcgggggaatcaggatggataaagacgtagaagagttgacaatgatagaatatgacgaggataaaaggggatgtagatgaaggggaggtaaaagagtgaaagtttgcgctgcttgaaagcaatggggagggaatctttgccgcgttgttgggatgataaactaatttgtccccctccgagtgaacaaaattaaatacaaaggccctccggaagcaaccacagtttattctgtataaactatcaaataaaatttaaaaaaatggaatcaaagaaagcagttaaggaaagcaatccgagggtgacgcaaatatatatcgaacaaagaactggacccgtagatgactttccgacttttacaaagacaacgtggccatgtcaattgcatcgtctatttgggattaaggaaagtgcgagggaactgtcgcactttaggaagacaggtgggttgggggtataaaagggccctccccccccaactcttcttctcttcttctcttctccctatccctctcagccaccatctctccgtagcccccatgagacagcgcaggcagagggtcccgtagcacatgctgcttcacctaccacagggaccataacattaccatgtttgttatgaggtccatgtaggtctgcaccacacatcaaaccgggctttctcgtggacgttcctgaagtcgtggctctcattgccacttgacgagtcctacggaatacatgaggggtggtgatggctgtagctgaagatgcgtattctacccagattgtctattcttatcgttatattctcatgactgtctaaacggagataatatcagatgatacctgaagcgtgaaggaagcaatttgtcacatagctgggagatattctgttgaggataccaaaatacaactctggagagtattggaacgtctcatcagggctaccataatcttacatagtaatctctgaagaatgaatgtgctctaatatccaaagatcttgtgtctgattctctcacaccgatagtagctcacataagctttgcgtagacaagacatcaagcctccaaaacactccggggtgcttaagatggaactgcaggtctcatctaccactctatactacatgctaatagtagtatgtgaccgttgaatgctcgggggcggctccgaccaagagacccacttttaggcggctccgatgtggggaccatatctacttgggtatcaaatgttctaaatatttaaaggcttcatctcatgttatctcaatcccaaattagcacgatctattccttttttgtttgactagaactctacgatggccaatccctcaatcgtcattgtgcccggcgcatggcaccgtcctgcgcactaccagcacctcatcgaggagctcgcaaaggtcaactacgatgcagaggccgtgaccttgccttcggtagactccaatccaccactggccacctggaatgaagacgcgcaagctgtgcgacaagtgattatgagcaaactggacgctggaaaggacgtcatcgtgctcgcacattcatttggcggcgtcgccatgtccgaggcagccaagggtctaggaaagaaagaccgagtcgcacagggtttgaaaggcgggattatcaagctggtctacatgtgtgcgatggcgttgccgaagggccaaacccatatcggccagttggtcccgcagacgcccgaggaagaagagatggagcgtcagcgcaaggagatggaggaaaagctcggtggactagatgtgtcaccggtatggacttgagtctttgcttctatataccttcaatgctaatctgtccacaggatggagcaatcagcctcccgaaggaccgtattcacctcgtcttttataaccgttgcgagcagaaggatatcgagagggctgtggagttgctcggcacattccccgcgggcccgttgaccgttcctgccacatacaccgcgtatcgtgagatcccgagcacatacattgtctgcaaaaatgatcaggcattgcgggaaccgttccagcggagaatgattgcacaaggtgagggctgctttgaggtagaggaatgcgatgagggccattccccatttatgagtaacccaggcttcatcgtcgattgtattcggagggcagccggagagaaggtctaggcatgcgaagacgttgactaccttgtcgccctctctatgtcccttgagctttccagtaatatccttagacctgggaagcgtaccatatttgagatttccatgttttatatgatgattctcctcttttccaaatccatttgaagctagaatttaacggttgcctcatttaaggcataatcaggcatcagtcgtggcgcggaacggaaaatcaatccagccgcgtcggaaataaccagatccagcggacgcctctcttgtagttatcatgtagacacggaatgccgggagacctcaattctcccaaggcgtcaattcctaccgtgaatccaccgcggcgccaaaatacaagttgtgattcatgccggcgttccaagcggcgatgtgttgtgcagtcggacccagacggcattcccaatgcgatatgcacgaattgccagcgtttgagacgccaatgtacgtttgaattcgctatagcccagtccagtcttcctttctcgcgaaaacgacagaagcgcgactgcgaggaaaccagtgggccaacaacgcaaaatgaatcgaatgacttcgatacaacaatcgaggaaatcactggaagctcgatcaatcgattcgatgctgcatctattgctgaccaagatgttatggcagcttggctgaatcttgattatgatgagattgtcgcggatagcgccacctccttttcaaccaacctcgaaccttctaattcattcgatgcgcttcgttctgagtacatagcgcccgcagagagccaacttacggccaccacatcccaactgactcgcttgcatcgaggacagaatatccgatcagataatcaccggccaacaattaggctttcactcaacagtcccatctacctgctgaattctggagtagacgcgaagatctttggtgatcgtctcgcccggatctatgaagcaatagcaacagccagtgcatccagattcttggactacgactgcaatctctatgcgactggcagtcgctaccggttgggggacaatgactcagggagctcaaatggatccgaaactgccaggccaaccgttgatgtaaccgctatctcaccacggcttgatctttcagtatcatcgcaagcaatgtctcatgaaatttccttgataggaagtgttcggttccttgatcatttgggcggtctttatggcaatcgactgaactcggctgctcggaagaaatcagatgacaccttctatgctgtccttcgcgtattctcgatgcaatggttaccgaactcaccttcgtttgaagtgggttctccttatgatcactttgctcggaatctagaggcgggagatgactcttccttgaacgccttcactgatgcttgggtgcgggcaagatcactcctcaatgatgcgcacgacgttcggtcatttcgagtggtattggcaacactcatgttcgttgggattgttataccaactaaaataactgatagagaggatctcgtaccgaacgacttccttgacacagctctgcaaaagttatcctatttagatggacttgttacacaatactgtgcgaacgtggggccgtcatctatatatggagctcttgctgaagcaagtttaagcattatccgatggaccgcgtatattcgcgacacaggcgcagcgttagcgatggatcggcaatgcaaacttccagatctgtggggtactacaaaaggttagtattttccatatgggaatatcaaattcaggcaactaaactaaaatcgcacagtcctctcaaataaagaggccgtggcagcattggcagtctctcagaatatcttagagttggatatcaatgtccaacccatctgccggaaagcaagtgcggaaatattttgtgtctggaggcagatcataagcatcaaaacagttgctaaccagtggcattgcactatcaatgaacggtcctcgtcaatcattagagcaataaacttgagtgtggcagctgtccgtgacttcagccaatcattccaacctttcatctctcagtgcatcagaaagttcgattgtctgtccacgtctcccaggatatctcttggtaagatatactcctaccatccttgactcatcattctctcacaatgctatcatcggcatcctactgacatttatcccttagtttctctcgtgatgttttggaaccttggcattttcctattcgccgaagtatttagaaaggtgaccaaagaccttgatacctacatcgaacaagaatcaggaccaaccgtccgagaataccagcgcgaggcagcttcatgtgtggcacaagtagttgaatgtgtacacagcttgcctaccgaggaagcttttaacctccagaatggactcggcgccgaagtcccaatcaccgcttatcatgtcacaccgagcttggctgtcacgactcttcaacgggccattgagagtgtgatagacctgcaacttcgctctcgctctgatgctgatttatcagacttatcagacgacacgcagtttttgataccggatgggacctgggaccgacaaattgacattctcatgaaaggactcatctcgcttgacgttactattggcggatcacaaaccagtggtgtggccgttagagggttaatgcacaaacatggggacataatatccgagtgttggacttcggggtttgactcatgacatgcaaacgtggtggattcagcggaaagaaattggtcgatggtaaagccaagcacattccttcgatattcctaggacaagaagacgccagaagcattttggtacatccgtagaagccaggatgctcaagtctagtttgacctagctccattccggaggccagcagttcctgtaactaggattatgtaacagtttggaagtatcgggcattcaggtggaactggcaaactagtaagtaatcgatgtcgtcatccatggatgggtgcaacacaaatgtgcaggacttttggggctacagtctcttcgctggtgattggaagttcagaatcactagtacgcacacaccgttggagccctacgcgtgtatacataatagtatatttatccttagtcctttgtgacgtgattcagaatttgtcgtgaacattgccaacatcggacaactctcctctacgggtggactaggcgccccaccgcctcacccgcgtgcaaacccccgagttttcctcctaactgtgataggtcagtaataaattggacattatttaaacttttgaggcttgcgccagactgtggagaatgaaatctcttttccaaccatcaaggtgaaaagtgtatagccaagaactggaccatttattcatggcccccaacgtgccaaagtaccgtccaatcacgtagacaggtgatggataattctgctgccttgctgcatgatggcgcgtctgtgttgtcggaaagcgaacccaaggaaaaaagcttttgcatactttgtctaagcctttcaatcggcaaaaggatctctggtatgaaaaataaaagtaacatcttttacggtccatagcttttagaacatagaagcacaatttgtgtaggtcagaagcaagacgatgatgaacagggataagaatgaatcagatccaaccgacgcatgcaaccatctttcgcacactcggagcttcaagggaaagcttgtacatgtagccaagctctcctcaacggtaacccagtcttgctgattagaatttatctgatcgcaaataaggtttaatctgatcgaatttatcagatcctccaagttatctgatcatgaaaattatcagattgaaagttatctgatcaaaaaattatctgatcacgccactcggagaaatccttggaaccaggcccccacaatccatggatgtttactacggatgagcagttatctgagaccttacgaagtcgggatctcggagtaatttcctgcatactaccacagcaaggattgtatattaaaggccccacatggtacaggaaacgccaccctcgcttacacaaatgggtacgacctaaattttaatatattcgaaagaaagaggttaaaaaatacccccgccctctaatcattcattccaggcttccacaaactacctgacacttccactcatggatacggaggacacgtccaccgtcaaaggggccaccacagagcacccacagcccctggactcagaggaatcaggtattccagatggagagattcagcaagatggtgttcagattgccgacgcagtcacaaccacgtggtctcgcaagcatttgattattgcttatactaggtgagcaaccttgctataagatgttggtcctaaatgccagatttaatgtgaaaatagtatgtggctggtgtatttcgtcaacaatctcaacagcagtctcactgcaaacctctctgcttacatcacgagtgacttttcggaacactcgctactgaccgtgattgcggtggtgaccagcgtgatgggtgctgcatgtctgatgcccatcgccaaggtcctgaacctttttgatcgaactgttggattcgtgatcatgatcttgattgcaattatggggttgatcatgatggctggttgtaacaatattgcgacctactgtgctgcacaggtgggtttgcatcatcaataccctctacagggctatttcaagatcactaatgaattcataggcattttatactgttggattcactggcgctattttctgcattgacgtgataacctcagatacctcatcccttcgtgatcgaggtcttgcttatgctttcacctcctctcctagcatgatcacagcctttgctggctcccccttatcaaaccaattccatgaaaccaattggcgatgggcgtatgggacgatttgcatcattctccctatcgctgcatttcccctgattttgacctgggaaatggccaaacgaaaggccgacaagaaaggccaattgcaatacaagcagaggacaatacgaacctggacagaaagcatttggtattacactatggagtttgatggttagttgcgctctcgaatccattcctttcatctttactcaccctgtttgcgacctagtcgttggaatcttcctaatgataggcggcacgattcttttcctgacatctttcaatatcgccggcaacaccgaaggccaatggcaatcgcccaagatcattgctatgatggttgtgggattctgtgttctcgtagcattcgtcggttacgagcgatggctagctccgaagcctttcatcccattctatctactcaccgatcgcactgtcattggcgcatgtctactcgatattacctaccaggtctcctattattgctgggccagctatttcacctcctatctgcaagtcgtctacaacacaagcctgatgcaagccggttacatcagcgccattttcgatttcatggacccgatttggctgatcggctgtggctttctcatccgacacaccggtcgtttcaagtggctactctgctgcgccttgcctctttatctcctggcaagcggtctgatgatctacttccgccaaccgggtcacaacataggatatatgtgcatgtgccaaatcttcctcgcagtgggtggcggaacatttattctgatcgagcaggtttctgttcttgctgcggcctcgcatgaggactatgccgccatgttggcacttctcagcacgtttgggaacatcggtggcgcggtgggcagtagtgtttccggcgccatctggacgaatacactccccggcaagctacgccagaatctgcctgccgacttgaaggaccagtgggaggatatatacgagtcgttggacgtacagctcagttatgcggttggttcgcctgctcgtattgctatccagaatgcgtatgcattcagccagcgaaacatgatgattgccggtactgcggtgatgggactttcaattatctgggtgctcatgatgaggaacattaaagtacagtctaacaaggatctttccaaggtccttttctagacggagaatacggggctcggaagaagatacatagactggtggactttctttctcaaaccgatccaatccataatggatcgagcccagttcagggtagctggaattaattggttacggtattctacatatattgcaacgttaagatggctttcacgcatttcatttcaaccagcggatcattatgacatgagaatttttcacttctcctgggagatgccgccaaacgcgccatgaacttaacactcgtatatcggctctcaaaaccagcttgaattaccgagcttacacattaacaataactaatgtggacttctacagactagtcgatttgaattgccgtaggctccataaatcaagattcccatcgatctaaagactagtatctactctactcggccctcaattttcgagaaatactccatgactccgtacaaaccctcattactcacctcccttttcatctgaacttcctgggtacgtagatatccttactttttgttcttcgtgttgttaccaaatttggtatgtgcgaaactttggatagaaaacatgagctcgagagatgtttgtctgccaaggggtagatacatcggaaaccagtattgtcaatattatgctatgtcattttgtaaacctcactctcacatgaatccatcggttatcttgatctctttcagcttgcgaggccttctaggcaacccgtttatatgcccatcatgttcatcgttgttgccagtctggtatttccgaacacacaggtactctagcccaggtggtaagcagtttatcagtctaaaccttttcctttccttgtaaggcccactgcgaacaccagcggcggagtataacagaaagtctatatccaagctcacccgttttagggccacaaattctttcagtgacccggcttgtgtccatatcaattgataaaattcacgttctgcgtctctgattccgcgttcaaatggacccccgtgtcgattgaaatgatcgtctccccattctccccctccgatgtcctcgtcgaatggatcaatctcatatgtcaagctaacatcaagaatctccagtgtcttcttgtgtgcacaaagcgcttttataaatgctttggggctgaagatagagacgctgccacacattctcgccgtgaaattcgtaagtatcttgcaagaccatatcagattcgcaaagtagagagagctagctgccgtacaagagagagagatcttgctgatattagaacttttttctttgaattcaagttttccatcatcaccctccttgtctccatgactgcggacggactcaattgacgggagagtgtcaaaaagcctcaagcagcgttcaaagtccaatgagaaacgaaaaccagcataatgtggaacagttgtctcggagaggtggagactacgaagattgcgaagatatgacttgttttcgggactggcattggcttggcgaaggagcttgacaagcgggaagtccattatattgctgtagctccggccacggggttggtccaccttcatcgtcacaatgttcggcgataccacaatcagaatggtgaccaaggcttggatgatgaatgcttcaccgccgacattgcgtctgtccacctgattagatggtcactcggagacgaagatcgaatgagattctcacctatgaacttttgctctttttttcataagcatattaaccactcgatccccttgcaggcttgtaaacccgccgtttctgagcgctttgcgcacgagacctatctcctcgttgctcaaatcccgctgaaatttgacttcctcgtggaccgtaaaccagccgtttactggtggtctagtggaatcgactttgcgcacgtaatgacccaaaataggtcgtttcaagatatccataatcatggctaatggcttgtcggtattttctgagcagatttgaattcggtaatacttcccgcgcgctaccatatcgcacagagagtgaagagttcgacattgtcttgatagagcagccacgtcatagattgaaagcaggtatgagataatccgatggagaacctcaaggggtagactgagaaatgacatgatttctgtactgtcaatatggaagggggggagggggaagggggttatttcaactacatttgtacggctttgcctctcctggtaaggtggctattacctaggatttgtcttggcattttgagaatttctgttgacaacaaagaagacgaagagaatgacgaaaaacaaatttgtcatgtcgtgatgccccaaaaatctgtcgttggccccgctggatctctccgcggaatgactttcctatcctggtgcgcggggatgtatattaaactccttccactccaacttgaaccattttaataacttcagtttcaaaatgactcaaatcttcctgtgagtggctttattcctgataaagcatgatccatgctttgctaactcaaattctagtaccggtgcaacgggctacattgggggcgaagtcctccacgctttacagcatgcgcatcctgattacgaggttgccgccttgatcagagatgaggaaaaggccggcaaagttttggctgcatttcctaaggtccgtgtagttcttgcggatttggacaatgtggaaatcattgagaaagaatcacgcaaagccgatattgtcatccgtgggtcaatttacatctggtagcctgatgtatcactaaccttctccatttagacgctgctagtaacaagcatctcgaaagcgtgaaagcgatcgcaaatggcctggccggacgtcaaaatggtatgtcgtctactgcttcaatatcttctttcgggtttgatcgttaattgaagtaaaatgcagcctattacatccaagttaccggggctagcgttctgtcaggtcctgaagttgatagcaactcatatggtgagccctcggatcaaatcgttgatgatttggataacgctgccgatctccgagacataattcgggcgtacaaagatcgtcgggtggtggataactacattctcgacttgggatcaggtggtcccaaaaccgccattcttttccctcctatcatattcggcactggtaacggtcccgtgaatcaacgtagcatccaggttccctcattggcccgggccgctttgctacaacatgttggtctataccttggcagaggactaagtcgatggggcattgttcacatcgctgatctggcggatctctttgtcaaattggtggagcatgctgtcaacgccactcccagtcctatctggaatgggaacggccttttctttgtggaaaacggtttcgaggttagttcatggcctaatatgtcacttctccgcgctaaccttcttgtttttctttcagagcttcaaagatgtcgctttggtgatcgccaaagaggcgcatagcctcggttacattgattcgcctgattcagtgcaatccatgaatctcgatgaggccaatgtagttatacccaatggagctgtgttcctgggtaccaatggtcaaggccgagcttcacgggcaagaaagctgttaggatggcaaccagatggcgagagcttccaaagcgccacgcgggagacaatcatcactgaagcagcacagctgcgatgatttctcaagcattgattgcaagttcaatccatgttattcagccaaaatgctatcattgatttcacattctttacgtaggaccagcgtaatattagataagaaataaagaaattttataacctttgcgaaaatattacgatggcatatataatctgtctcggaattctactggattactccgtactgatctttgagttctcatagatgactttgacaaaaatggtggaactaaaaagggactatatcaattgaaaaaccactagccaccatcaggctgtaatcaacccagataaccctcctccttcaaaatgcatatagcttcaacagcaattttatatccaaataagttgctaatcatcagcctggaggaacgaaaagtcagtgtaccgccccgccgccttgtctgaccgcctcgaaatttgccggactttactttttttcatttacgatttttatcaccgccaaacagccctctttctcatcacaatatattgctttctttgactcttctccacctcgtcgtcctcaatcatcatggcgactctggcggagaagcttgagaagattaagtctcccaagctgcagaaccagcatcacgtaagtttccctgttgcataccacccaatgaattgacactaacattcatgaacagaccgctgtggtgctctctgcagttgaggatactctccgtgatcaaaaagcagacttctcgcccaccgcatattttgctgctcttcttgcactgctctcgcagtcactgtccgcatcccagggtattgtcaacaaggacctagcgacatccgttgtctaccttctcgacatcacaaccgtttacgtccccgccccgatcctttgctccaaattttcccagatcctcgaaggtcttgcacctgcgctttctctccccgaggtcgaagccccgctcctgcgtccttcaattggctgtcttgagtctctgctcattgcccaggattctgcatcatggaatctcccgcacacacaggtcggaccgcgacgcgcaatggcaggtctactgagtctatcggttgaccaccgcccaaaggtacggaaacgtgcccaggaggctcttgtcaaggttctcaaggcgcccccaccgagcccgtctctggaccacccgggtgcggatatgtgcgcccagtctgcgatgaagactctgggggatagcatcacagccgcccacaagcaaaagaaaggtcgtcatgatgctcaggccaacaaccatgagccccttatcattcactcgttgcagctgatcaagaccattgcctcggcgtcaggtggctggcccagcaagaagatcgaaccgctcagcgaacttctgatgaacgcttcccgctctagcaatgagtacatcactatgggtgcctttgaggtatttgaggtcattttcgaaggaatggcggatgaattctcgtcttcaaagctgccccgtcttttggatgctatctccgaactcaaacctgcgcagaatgactcccagcttctccccccttggattgcagtgctctcgcgtggttacgatgtggccgcacaaatcactcccgaggatactttcgagaagttgccggatctgttcactttgatttctggattcatggcttcgccttccagcaacatccgcgtttccgcatcagagtgtctgatctcattcctacacaactgtatccctaacagtgttattgtggatccatctgtgtatgacgagaagactttagagaagttgtctcgtgcagccattgatcttctttcggtgaagtaccaggctgcttggaaagaggtattcaatgtttgctctgccctcttcgattgcttcaagtggcgatcaagcccatatctggtcaagattgtctccaccatcggtgaactgcgcagcaatggcggcttccacggcaagaaggaagccgacgccgtcatcagcagtgctatcgaggccatgggccccgaggcagtattggagattcttcccctcaacattatcgagcagaaggctggtcagcccggccgtgtctggatgctgcccattatgcgcgatagcgtgaccaacacgaacctccgccacttccgtaccgagctcgttcccctgagtgaggcactgtaccagaaggtagtggacttcggtgccgctgagaagtctgtggaagtgaagatcttcgaaaccctcgtccaacagacctggggtacccttcccggctactgcgagctgccccttgatcttgaggaggcatttgaccagacattcgcggagctgctgtctaacgttctgtacaagcagaccgaattgcgtctcgatgtctgccgtgctttgcagaaccttgttgagtctaaccaggctatcttgtctgtcgaaaacgatgaggacgatctgatcttgcaacgacgtatcaccaaggccgctgcaaagaagaacctcattcatcttggcggtcttgcgagcaatctgctggctgtattgttcaacgtctacagtcagacccttcctcactaccgcggctacatcctgcagtgtatcaatgcctacttgagcatcacccctgaaaatgtaagttgccttcagtcgtatgcaaatttacacgactaacacccttcataggagctaaacgaaactttcacccgcgttacttcgatgcttgaatcttctttgattaccgagcaagagacagcaaccaagcagagtgcttcggctcagaacccgtccgacaagatgccaccgacctcccacactctgattgacctcgttatcgcaatgtcaatctacctccctcgctccagcttcagtggcttgtttgccatggcggcggctatcctcaacagcacatcccccaacccggatcagcaactgattaagaaggcctacaagttgattccccgacttgcaacgaccgagactggtcgcgctgccctccaggagcgtagtggagagttgcaggctctcatgcttgccaccaccgataccacccctgcatctggccgtcgcgaccgtatgctcgctatcaccgagataatcaatcatctgcctacctcggacctgcatttcatcccggccatcctgtccgaggtggttctgggctgcaaggaaagcaatgagaaggcacgcacagcggcctttgacctgctgattctcttggccaagcgcacaaccgattcagagcgtaaccctcccggcactctcatccgcagatctcttgtgcccggtgtggcggacgattccccggatgcgcctgctaccctcgaggagttcttcacaatggtctcggccggtctggctggctcggctcctcacatggtcggcgccaccgtcactgcgctttcgcgtctgttcttcgacttccagaaacaactccagccggagatgctcaaggaactcgttgagaccgttgagctcttccttacctccaacaaccgtgagatcgtccgctccgtccttggcttcgtcaaggttgccgtcgtcgttctccccgacgaatctctacgcccccgtctcagcaccatggtccccagcctcatggcctggaacaaggagcacaagggccgtctccgtagcaaggtgaagggcatcatcgaccgccttgtgcgccgattcggtgcccctcttctggaggctattgtcggcgaggaagaccgcaagcttatagtcaacatccgcaaagcccgtgagcgcagtaagcgcaagaagagagagggtgccgaaggcgaagacgaagacgaagaggagaaggcctccaagccccaagccggcaacgccttcgacaaggccgtctacggctctgactcggactcctccgacaactcggacgacggcgacagcgacgtcgacgtcgacaacgtcgcccaaatcaagggccgcaactccaagaaaaaagcaggccagagcacccagtacatccgcgagatgtcccccgaggacaatcccctcgatctgctcggctcgaacgccctggccagcatctccaccaccaagcccagccagcgcttcctcaacacaggcccgggctcgaagaagaagcagcgcaatgccaaggtcgacgccgacggccgtcttgtcctcggcgatgacggcgatatcgtcgacgacgtcgagatgtccggtgctggtgacggtggcgtgaacgcctacctcgctgccgtcagcggacccgatgctgtccgccgtggccagagaggcaaggtgaagatgggccagtcgtcgaagaagaacgcaggcgatagcatggatgtcgacgaggacgacctgaagcaggacctgcgcgcttccggagccggtcagagctccggccgtcgtggtcttggtgcgcccaagacttccggtgcgtctggcggtggtcgcgttgagaagcgtcgcaatccaggcaacgctcctcgcggtggtaaccgctcgggatggggcaagaagagataaactatttactctacggtgaatcgtatattttcttgccggtacggatactgtaagtggagaagagggtggcatatagcagatcccggagttatcgttctgagttcccttgtttttgatttttgatttttttgtttctgccatctggtcttcggtccctgtcgtgcttggttagtgttgacgttctcataataccctccgctgtggtgattccgttgactctgggctttttctgtttcgatgcagagttattgactccgtgtttttcatgatatgattacgattctattcaaaagtttctattaggtcaatggacatagatattgttttttgtgtgtggtctatagcatagatgagtagctttatatttgacaccatcacgaatcatccgatatcacatgacactgatgaaatgctactaaatgtacaactacagctagttcaaataccagaacccaaatgcaatgattttatcatatcctcatttgcaaagcagttatcatgcaaaaaaaagtgtatcgaacatatcaatcagaacttcatgaacgcgagccagccaaccaggcagctcagcagtatttcccacagcatccatcgctcgctccgagaagtaaaagtagacgtagatgtagagcgcgacgcaaaggggacagacaacaagaagctgcaagcttagaccagacggcatcacatccatccaagcgcatagcgtcgacagcttcctttcctcgcagtatacagcagacaggacagtacagtacagtagtagcagcccactgcgagcatccgaatccagccaaaactcctgccgatgcaatttgcaattccaaacgacgaccgtccgtatccgcacggcgcgaaatcaaatcgacaccgtcgctcatcggaggtcatcgagcagtttatgtcctaacgcccctttgttctttttccttttccttttcaacactcggtctttcaacggtatcaacccgggagatagagaaagcgataagtcgacagaccagaccagatcaaacacacaacaagcacgtggtgacaatgcgataattagaacagaatctccccgctgtgctcgggctcgaaaccgagcgcttggagttcgtcgtagcgcttcttgtcgcctgttttcctctttgcgtcctctttcttcttcagctcgaagacttcttcgaatggggctctggtcagtgtgggcgggatatcgtcttcgcggtcaaggtcctgtgtggaattgagaatgcgtgagcggggttcctaccagtataccttaacttgcagcagggattgaggagatcataccacttcgcctagcaggagcacgttctctccacgaacaatgaatatgccacgtgagacatcggcgtacagctgtccggcgtagacgcgctctatagtatcctggaaaacaaggttcgctagaagatagcatgtcagataaaagagcgagacagattcaagagtagtgcgactggcataccgaactggtcccagcttctgagaacgccgataagtttgcggccgtcgcgaaggatgagtacaagtttctctgcgattgcgtcagtcttctttctctcccttgttcttcagctctaggccgcttgagtgcagctgcacatactatctgttagatcgagcagctgtgcggcggtcgtgaacatctgcgggggtaattgcggcgggccgcctgttggctgggggcctgctgggccgagggcattctgggtgaattgttggttttgctgcggggtgcgagaggccggggcagggctttcgtttagagataggcgctccatggcgttgtctgtgttggattggcggagggaaaatcggaaagcggtgtggaggggtagggagggaggcgggaggaggctgatacagagagattcaggaattggaggtggagcttctcattctgtttctgatcattcgcgatggagggatcgaggtcgcaaaggccgtcatcacgggcggtgagtttgtcttgtttgctcggggctgctctatacattttggtttttgatattcttctgagacataacatactctatggaagaaaaaaatacacttgccagttctaagtctgaagaaaagtacacgctatacaaaagcgaaagggggaatatccaaaaaaaaaatcaaaaaccaaaaaccaaaacgcgtctatatctacaacaccccgacacccctctgctgccccctcatcctctcttcccgccgcttactatacggcgcacagtacggctcatccgcagatccaatactagccctaaccccatcctgcgagcgatggtaggcaggactcgacggcgcaggcggcaactgcatagccttgaactgcgcatctgtgataacgcgcatgccatacagataccgcatgagctcgaaatccggccgactgcccgcaagcgtctggccaagacagtagtggtcagcagcgacgtggtcgagcatacgatcccacgccgagggaaagtctccagacaggggtcgaaccgcgtcatcgctagagcggatcgactcgccgtcctcgagaaccggcgacgacacggggtccgaaatcccgtccacaaacttggtattcggacacagcggacaccgcgctgacggcggcgtcgggtacgagcgaaagtgactgacgacgtgggcgcgccactcggcgctgtcggcgaaggacttgtggcagtccagcatgtggaagaggcacgcgtatgtgcgctgctcggcgcttgtgctcgtgctggctgttagagaggggggtcttgacggcgagagagcggggtcggtggttaacggtgtcgggtcaccgagaacgtagatcccgagcccatctgtgctggtatctccctgtgcggagtcaaccccagtcccgggcctggtgtcaactgatgatattgacggggacggggatgcgctcgacaagtccggcacggcgggtgaagaggacatggcggtgacgacgacgcccggttgctttcgcttaggctgtctttgcgacagggcgggggtcctacttgaagcggtgctgctggcggtcgaactcacgctgatactgacgctgcgggtagaagacgatcggcgaaggtcgcgatctctatggcggtctctattgcgtgaatagaggagctggtcgaggtcgcctcgacgagagtcccgatggtcctgggggcttgtgggcttgcgctccgacatgctcgatgcaaaagacggggaggtctagtacacggggtggatacggctggatcgtgtcagagtcaggttacccggggttacatagcaataggagtagccttcgacgggtagagttagaggtatgtataggattagggaggagaggagaggagtaagtaatacggatgaggggaacgggatagaacgggagatacatacaccccaaggatccgatataagatcagcagaataccttcagatctgcactttttcagcatgcatgacatccatggccgttctgcgcgtacaatgtagacaagggtatatagaaatgggctgaagtgggggtgcggacttttggatttttttttctgaatcttagggcggggcaattggggctagttgggctataaggattcagatggctatactatatacactatcacctggatttgtgtatatttctttacctgtctttgttggggataggtctgagatacaatgcacgggcggctgtctgcaggttgttttcgttggatagaggattacgctttgggaagtacaacataggaagtacaagatgtattcgccatttgtggatataagattatataaaagatcttcatagtctggacctagaggaacatcgaatatctaggctccatggatctacgttagtattcttcacaagtacgaagagcagggttgagaaggaatctagatcgttggacgtgttctagacaaagattcagttgacatgtgaatgtatctttctgattctattcttggagataatggaatagagttgcaatattgtttcagattcgatgtcaaagacatccgaagtattcagataatactaggctgtacagcatacatcgtatgtagatgccaactatacggccaagtgaattgcggggagatatcacatgcaaataagccaaaaccgatacaaagaattaagagtaaatgtcttgatttgctcacaatgtgaggaattaagtaagtgaagagaagtgaagtaaaggaacaggttcagaagtaaataagaccacaggcctcgggagaggagaatgacatagaaaagtaggtctttcgacacgaattttgaactcgaagtaaaaaaagaaaatctccagaggagtgaccagccaggggtaaaaaaagatcccaatccgtctatttggtggaagcgccagagataaaatcaacaaacccaatccgacaccgttgatgcccgcaagccaggtaaaaatgcacaagtctatatcgtttcgtggcgcgcataacataagttttcaaggcataaaaggttgcaaagaagatgagttagaaccggtctgccaggtccccgccagcaacggaattggtggctgacgagttcatggaagaaaatccggccgcggggttgagcatgtcctgcaccgcaaccttgggaatctggggcacgggcaacttgcgctgtgtgccgtcgggtttcgacatgatatcggagatggttgggcccatgtgcccctggttggggctgtaataattgggcccttctggttgcggctccatgggcgcgagatcaggggtgtgctggagagacaggtggcgaatcgaaggcagatgcagctcgctggcaccaagagggcgcagacggggcgagtgtgcaggagtagccaatggagtgtgatcaggggtaggggagagagaatcgtgggagaaggtaggagaaggagcggtggagttgggagagttgggacgagagcgcttgacacggtggccatagccatcatcgtcatcgttggaatgcgaacgggtcatgttctgcgaaatcgcatatgcggagagcgaagggaggccacggctagtgccgtgatgacgggagccgaaaatctggtgtccccgcgagccgtggaagcccatgtggtcatcacgctctacttgcgacgccgctgtagccaggagattgatatccattccggaggaagcacgctccgcggtgcgggagtaagggcccaaattcgagcgcatgtggttggcgtagttggagaaggagtggggaggggagacatccggagatccgacctgcgatactggcgcggagcgagtgataggcttgctaggaggtggcatcatgttggaagcattcattccggagtcttggcctgcggcggccgccgcccccnnnnnnnnnnnnnnnnnnnggcccgcggccgccgccaggtgctgagccttgttactgcggcgcgagttggggttgttgtggatgcgcgaatggcgagttagctcgtctgatcgactgaagcgtttcgtgcagccggggaactggcaggcgtgtggcttctcgccggtgtgcgtgcggatgtgtctcgtctggtgctccaggcggtggaacgcacggtcgcaaaggggacacttgtacggccggggcaggtcctggcggatctcctcggtcgcggggcgcgcccccttcataagcggcggtaacaagctcactgaagaagccattgaatctccgctcgaggatgtgtcggattcgtggggattaagtagatttgagaatcccactgaagaacccggcggtggcatgtgaatccgtgcggcggattgatgggtgatactgaaaggaggaccgagaacgggtttatcgcaggggtcccgagctaaggtcgatcagatacccggattgggatgggaaggtcgatcgggaatcggagtgcggcgggaagagttctgatagctcgggttggttataaaccacgtagtcgagtagtgcagaagcgggagcaagagggaagaagaagggggaaaaagggaacctggagacgacgatctggggagtcacagataatatagggaatggagggggaagggagaaatcgggggagaaggggcagtgtcggaatcggacttggagaaaagaaaattctgaaaaaacgcaaagcaaaaaaacgaaaaagaaaagaataaaataaaataaaatacgtccaggtaaaaatgtaaaaatggagagtgtgggggagaagaaggggagacatggggcaaaagaggaaaaatacaaaaaccggaaattcccaaaggggaaatgggaaactaaaagaaataaaaaagaaataaaaaaagaaaaaaggacggtccttactggatgtacatcaacctggctatgtactatttaggatagataactgaattaactaataactattccaatataatcatattccgctactctctaatattcttatagtattgctgtggtatactaactacgtaactgcataaaacaaaaatgtggggactcgcattttgctgaagaaccgtgtggcgtgaggtgcgtgtccctatccggctatcgcgcctctaacaattcttatcagaacatggggggagatatcagcgctatctcgggatgacgagcaaaagacagtggatgagaaaagaaatggtggcatgcggagagccgatgacgagcagaacccggggtcgccagtactcaatataaaatgatagatactccgtgcttccgtgctccatagcaggtacggagtacatagacatagtcctgcgaaacccagggccaaagtctgggggtgacggtcattctaggcccgaccagtccaggcccatgtacaatggatgtacaatggagatcctggggaccatctgatcccgtcacggagtgacgatagcgaggatcatcgatgatgtcgaccgaaacgaaacgcccaagggttaattctggtaatcatttagtcatgcgaacacaacccagtcaacaggtcatccaggcatccagcgcgaagacgagatacgaaaatgattcgggttgttcattgctcaagacttcatcatccggaggaatcatccccgaaccctatatatcgaaaccctgggatcaaccctgggatcgtctgctcaggttcgccgacaattcccccggattttggggtaagatatgacgaatttatatacggagtacatataattgtatatttctttaaccgactgatatattgattgtggaacgatagaaccaacaccgctgataggcgcggatcatccaattattgatagccccgatgcagctgccatgcagccgcaaagccgcgtatctctagatgccagtgtcagcccctgcacaatgcgcactcggctgtattccttgcgcaatcagacggcggtatccctgactgccaagacgcctaagtatagaccccgggggttgatttcctgaatctcacatcagggtattaaccggggtctggggtaccggttcaagataatattaattacgcttaacaggtattgaatattctcctatcagcgatcgagatatcttcacgcttcgctaagaaggcaactataatacaagattacatactttcgcccgaagttcccccggcttaatggaagaaaagggccgaggtgcgggataaacgggacggggcaaagatacgcccactcggcaaggccgtcccgccgagagagtccggtttgcgctggaaggcgttatctttgggtccggcatagcgttactccgcgattctattgtatgtgtaggcatattgatttgatagatacacatacatatacactaaactttacactacaatacatatcaggggatactccatcttgcagggtctagtggcggatcctaacggaagttttacccccgggcaaattcactcgatccccacagttcacgatggctaaattccttggcaaattaggaccagcacacaaacgcaaacctgaaagcaaagcggaaagataacggagtatcagggcccagatgcctatgttgtatgccggcccgactaccgagctggtactttttgatcggggatctagaaatcgcacgaatccctgccaggtttaagaaaatacaaggtaaaatgagctcacaatatacccgacggtacggagcacactgccgcaacctggagttctccatttttctccacggggaataatggcgccattctggtcaaaggccggactcggagtggcaataatagcggtcttttgttattcttcatctcaagaagcaggtaccgtctcgaagcaatgacccgccttttgccgaatttgcgacgtgtacggagtgcatttgctaggatcgtgaaactaatgagggtttcggtttcaggtgacgaattcagatctatcagttgatgtactcctcgtgcacctgctggaaatcggaatattcacagaacagatatccggattcaaagttccgacatatattcctgaatccttccccagaactcgtctcacctgccccgattctcacccagatccgcaaacctacgaactcgatcctacctgtttagtacgtagataagtgccaggtgggggacaccgaaaccggcagttccaatcgccgacagtcctaaatcgcaatatcacgacagaacctcatcctccggtcttgaaccggtctgcgccccagaaaatccaacctattttttagaatgatcgacaaagtttatcaagccgatatacccggtgatgaacactccaaaacacacagataagcatacaacatatacacacatactccataagtcatcctaccccacaatctccaagtgatagccatggggagagacccgaaaccgtagaatcgatctgcgatgacatctcaatccaaatctgccttgatcaccgcgatcgccttgaatacgatcatccgatatcgctgtcgtcatgcgctcctccacacaaggtcaaggtcgatcgtcacgccatccggggagacgggagactggcaatctacggtagtggtatgtaagctggatattagacaatggaattacctatattgtacatctagcttgcaagtatgtgggactgtattgatgctccatgggaattcaatcgggattcgtcactcaagcattccccttcccacttttccttgcccactatgctgatcaatcccattattctggcatgcagacccgcgcacagggcgggtacgtcgatcctggatggggggaaaaagcaaaactagtcccaccaccgaaaggggacgaggtagagagaaatggaaatagaaatgtaaataacaacggcaagggaaaagaaagtgaagggaatgagtatacgcaatagtaaagctcgattcgggcgtggagatcctccggactccctccgttatcagttggagcctcgttcagttgtacgcggggaagtcctctttccatccgattcagccctcagggtacctattttaggcaaaatatcggcgaactagtgatatctatttctattccccgcacccacacatatcgttatgtaagatcactagtagtgggtgaggggagatgaaatacttttatagttattatattaccctattattcataccctctggaatactttccagggtaaggcagtaagtagcgtacgagtccgagtctggacgcgcccgtccctttcagcccacacccccttgctacataagctcagcagttgctactggctgtacgacatccaagttccaacacggtgtgagtcatgacgtgacgtgctcacggcccagctggggaataaccaagttggaagctgaaagcgaaagcgcgtaggaaagtcaaaaagaaaagtgacaggccaactggcaacaagggatcggctcttgttttgcgctccgtttccaatcgcgctgtcttttgtctgaaacccctatcgagaggtgtcattggtcgagacaagatggagttaatttagttacctagttacgttatacgttgcaaagggaaggcgatctgatacttcaatatataagtatggtacagttgtatgccattgtgtctcaaggtgacatttctttatgcttggcaggtctcgatgcgggggagtagtttcacaatggagaatccggggtagggttggcttgagtaacattccacaaaacccaggaatgctaggaggtcattgcgggtgcggttactctgtggaatatacagcggggtgtagactacataggtttcccaaacacacatgctaaagaaagtgcaaccctaatcagctcggaggttttgccagcgcttacctcacatcctatcaccactcactctccttattgccccaactccggacgatcagcgctccacaccttctagaacaaactacctcgcagcacccaatcagcgtcacgaatggcctcacactgatatcaccctatgcggggccgctattccgcgatcaggccattggtggaaagacggtcgattacactatcttacaatctctgtcctattatctggagaacatgtgatattctggggaatagatagcgaaacgaagagaaaagagaaagtcgaggcggggaaaaagggcacgataccgcgtccagttcccggtgaagccccggacacccctccaattccaacatcccacgtcgagggggagaacgaaaaaattttctcttccaactccactgagcgatttatcgtcatttcttaccccatattcgcctaacgttggataatgcaacccactcgcggatgcggttcacaatgcccctgtcgcaagatccacattgggcacaggtgttgtgtgtacggagtaccgtcttgaaggcgctataaccaggtaccatatgcaggagatcagttagtctgagatgaggcagatcctagcttggatttgcattccgtaaggcactagagaaacaggggtaagggaaaacaaaggtgcggagtacgctgtggctaccataacgggcgcataccccgagctaattaagcgaattcgagctccaaaccagcgcgactctcgctggcacgtgtacctatgatattatcctttgttagatccttgactattggaaacgggatcaaaagtataactgcgggagctccggactcttgtcttccctattgggagtatcataaagcgggggggtctagatctgcacggacaggatagttagtttgtagcttgtggatttcacatgtgaatgcgcgaatcgtatgttttgatctcgttggcttcgagcttggaatgcgggatgtggaggtctgataagagtaagagttacaggaatgcgcccatatgcgcccataggtgcatgactgccttggttttgctgtgcatgccttgcattgtgcaagtgttagctacggagtaccttcgggagtaacgaggcgatggcgtcattgaaggggggccatgtgttttctccagatttggtacggagcgcattgataagggattggacgtattcaacacgtcgtctctgatctgggaagggctatcttactaaggatgtggtatgtggatgacgacagagctcatagcctagatcatgcaggtaccacaacatcagtccatagaccatagggctagctggctggacagcgacaaccgggtgatctcggaggacgacatggtgacattctcgcaggtttagggcatccagttgcggggcttagtgccgatatgggaatctcccctccgctttacatattaggaaggtctgccatggcttggctctccattttcgcctatagacggagctgtgtactttgtgggggatagtgcgagactctatacagcactactccgataccctcgatggcaaatttggcaaattcaaggaaatcaaattttcacggagcaaccgctgagttgagtatgtaaccgcaattcaaaaaggggctcggtgagacttcaatttccttttccccgctggagcctcccgatttacgcaactcgggcgagattctttcggcatcgccgtgccgattcgggctctttggtcgctttgcctggccgccgtgccggtttttgtctgacgccggacacgcgtattgcagtggtactctccacactgtccacacctattcttatcgtcccatacggtaagtgccgtaccagcgttggtgcctctccttttgagaaccatgaccgctggaatgccgccacaccccgagattcctccgaggctcggaagttgggagtctggggtgagccgtgggatgatctgcatgagtagcgaatgcaggtaatccactagggtctcccccgtctaatcgcattgcatttctctgcattctattctggtggatggagtcctgcgtactccgcaagcctcgggatgggagagcctcgggatagcgggatttcttcggatattgggaggtaattcttgtatcctgcttctccgggttttgtatacccagtctactccgcatgtagcggtgaggccccagtgtttcaagtctgataggtaggttgtggagatcgatgaaaatttgctgtctgtatttgcctcttgaggaaatatcaaatttaacaacgcaactattgaaagcaaattcgatggtgtcgaataccgtctaaatatactagccaatatccaaacttggagggtccaacgtaactaatgcgcaacgctaccaatttcatgaatgcatgctcgtttgatattaacgaaaataagcattctactgatgtcatttataaccagtcacctcttggcttctataagcaactttttttgtagccctaatcttaacaatttgccctatcaaaaccctaatctggcgtcctcattctatatcgagactcgaccaaaagcatgagcatatagtggtaatccaattggcatcagatagatgtccattccatattgagattcggacgcatcagtctatgacacgtcggctggtaagtttctgctagaagtctttatttccaagtattatcttctcttcttctcactcaactgatacatggcgttctgctctttgtttccgctcatcccatttcttataccatgccttctaaactacgttagtcaatccccccgaatgttgtaaagggggtgctggacgctacccaaagatccctcatacggattcttgcagaggccaaggcctcaggctagatgaggcgcaacttgaatatatgccgcctcaagctagctagtcagtattttctccgctataaggagaattatgagcgatcataaagatcatactaggtatgtcatgcaaatatctcccttccctctgtccaaatctaattctataaacagtataacgcagcattcttgcagagtacccctccataaccacggatatactgtacagcgatgatggggtgactgaaggacctctacacgcacagaggtacaggcttgatgggacaccagcttcctcccccgagcaccgatctaggggcctggtgccacaaatatccctcaagtaccccgggccaagcccgaataggcactggtcgtcgggactcctcatactttctcttgtagcggtggtataacttgccgactgcccaaccggaggcgacatccacgatgctcgccacccaacttggagccttcgcctcctctacaaggatccgtacaagggatctttgtgtggcatccaggactcccttcacagcatccggggggatcgactaacgtagcttggcggacatggtataagaacgtggatgagcggaaacaagaaagcagaccgtcatgtatcagctggggacccgaggaggagaagagagaaaggaagagacggagactcgagggaatttactgttaggactagctaccagcgtatcctgaaaatggaggttcgaattagagtggaggtccccagcgtaggtcatgcaattcagtagactaatcgctaaggttctaaatctcatgtgcgcggtgtatatatacccctagcgcttacttagcaagtacgtcggcccatacaggccagttgtataagtgaccctcggggtcgtaacattacccccctcctttgtgagctgcgtcctcgaagctcttggcatttcctttgagaggcacttctttaaatgtgcgttctttatctcagtatagcgacctcttcgccagaaaatgcgctataatagtaactcctaacttcctcttctaccctccgctatatccaactataacccttaggtcttcactgggaatcctgctgcggcctggtatatacaatgtataaatcggatcagcgctaatcatatatatatctgtatatcttacacgggatctcagggtactaaatatacctattacataagccttcggtaggtttatattatggtatagaggtcctacttcttcgtatagggcgttactaacctattaggttaatctatacctagatacgattgtaaatcgggctatcctagtaccttctacgattagatctcagtaatatactcgaaaagacctagttagctatttctgtagtacgcggctggtacttatataatctatctcctataggcttataccccctaatatacctacccttaggctatcactgctactagctaggtagttaccccttcctccggctcctctactatcttctctataggcccctatatcttacttgatatactcctagcggtccgttataccttagatataggctcctatatagaatactattatagcctaggtagtaatcctaggatttacaggaagtatagtgatataggaaggggattatcgaccttcgaccctctaggtagcgatatatcctttactataatacttaggccttatttctatatatctttagttaatagcctacctatagtagtggctataacgcctctatatactatattgtccctaggctatttatactagactcttagccctacctcctatacctactattatataccttctgtattatattcctaccgatatatactgcttcttacagtatcttcgcggtcttaacttatcttcttcttctttataggttacccccttttagcttttataggtagtcttacgcgctcttcttttttaaactgatctaatatagtagtttcttctatatacacctaaggttcctatatattcttagtatctctatagcctttctatttaactaggtactctgcccctttatagcggcttttaaggatatattctataatatannnnnnnnnnnnnnnnnnnnncttactattatatctaagtagactattatctagccttatattctaggctgtgccttctaggtagccgccctagccctattagtctatttctataagtttcttttacactaaggtatctcttatctataccttatatataaagtcccccctaaacaaaaaacatttgtgcagaggcggccatttctggcctcaaagggggccgaaagtggcctcctcggcacagttcttccgcacacgcactttcggtcccagagccacgcgctcctcgcctgccccttgtaacgtgcaccgtcacgttcttgttcgggtcatgttggtacctgggcgcgtggctccccttcccctgccctcgagccccgctcctgctttccatcgacttctagccacctccgggcctgctccttgagcgctaccatgacacctccgttttgtgaggtcgccaaaaatggcacactccatcccaggctcattggtcgctggggcaatggggtccatgactataaagctgccaacagtccctcctcactctcctacctagccctcctctcacctatcctttgccagtccctccctcagcgcgtgcctcacagccgttcgtcatccccgttgatttgtctacctgcctggagcggcttcgcgcacatcttagttttcccaaacgcagcatgagcgacgttgcagatctatcctctgcgaccgacagtgacacttccggggtgtctttccagcctgacatcgatgcgaccgatgactccgattccggggaagcctcaaattcaaccgagctgacaactccggaacccacctgtcttcctgataatcgtagcaggccttccacccgtccaaaacgacccgtgccccgtccagcggacgctggtgttctgcccgatttcagtgatgacccggatgacgacacagacgaggacattgcaaacgtaccacttgattatgggcgctcagaacaaaccaaggttcggggtcgacgaatagaaaagcgctgggacaagtgagcatttattcagacctacgcaattgggaggcgattactgatgtgaggcgtaggtactgccgagtgaaggctgctcaggctggtgcgctgttgaaatgggatgacccagtggaggcactgcgcgaggttactcctaatgacgtgcatcgttttttcaactactgcatgaagctgaagtatggcgaaggcggtcgtcatctgaagggaacatcgaaagcgagcgccctgaaagctgattggaaaggatttcggggttactatcggagaattacacggaccaggataactgccgaagatagcgaagagatcaatgcggtaagttattcctcttagtctgacgctcggagctgactgggttctagggcattcggaaactcatcgataagttcgacctcgatacacaagaacggggcaaggagccggtgtacgtccaagacttgactgaattgaacgagacgattctccgaactcaggaaagacgatttcattttggatacgagcgaatccagctctgtctcttcaacatgctcggtatttataccgtgaaccgtctgcatgctcttctttcgctacagttccaccatctacgtttctccatacaagataatccggacgggggccctcccgtacttttggtggagatcaaatcggagcacacaaagcgattcctcggaacttcccaaatgtatgtatcgtgcgttgaacccgggtaatgatgatcccaatattaacactacttcttagtaacaattttcctttccctaaaatcatcaacgatccgtcgcttgtcttcagccctcatacattcatattcggtatacttctttggctccaagccttcgaagtccctacgctttcctccatggagcgccttcgaaagctgttcgtccaaggtggccgacaacagatggaactacccttgaagcgcgaagtcgaaggctattatgtcttctgcaagacagacgtaatcaatggacgtgcggttcttcaatggaaccagccgatgaccgatggcgccatgtctgggcgtctgagaaatctaggggagatccacggcctccttcagtcaatgttcgcccatcgttttcgctatggagggggaaagatgttaaacgaaagcagcgcggtcagcgaagcacagcaaaatctgatcataaaacacgctgacactcgcactttcttgaatcattatcttccacgacacatcgacaccgatatgcagaacgttatgaacggccgcgaatctaacaagtctctgatgcgcgctatcacccggatgagtaggtggattgacaagagacgccctcgacacctcacttcggagcaacgagcgtcccttcgcgaacatccagaatatgtcgaggccactcggcgaatgaaggagcaagccgaggagtgcaaatacgatcccagtgcagcgatgcaatcgcgattagagaaattgacacgcgaaacctccaatacattcggccggttggaaagagcactgagacggaaggtgcgccatgagttcgaccgcaaacaggccatcatagacattgagcggcagctctcaggggctgctgttgatgacgaagaggcgaagaaggtacttcaagtagaagaccagatgctaccggagcagattgatcttcttgagaaattattcacatggcctacctctcaatccctggaggcggagtggcaaagaaggaacgctgccgtggctacgatctcccgatactgtggtttccttgaaggtgggccattgcgtgggcgacgtaaacgggctgcaccaagtgacgggttcgatgaagaacagaccagcgtgttaccagagccagccaagaagagttgcagctctccggagccttcgcagcaggatattcttcttgtgaaagccaaaaattatatcaaaaaggccaagaagccccgccgatgttttcaatgttatggcgacaccgaacttcccattcatcgccgcacgcagaaatatagcgaatataagtcgactctacgacactttcgagagaagcacttgcaggatcgaaggtgtcatatgtgtgacgaagatctactacatgagatgcatcttcgcaggcatgcagaagaggttcatcgcctcagtactgaacggaattactacgccaaagaagacacgggatcggacattgataccgattaatcgggaggcttgcaggttttctgtcaaatttaagaactctatcctttttttctttgcttggccgtttccagtcttcgagttaaacgtccaccctccctgtcttcggcagcagtctggccctcccatgtagccttacacaatagtgatgcaccataaacgccagcaagttacacgtcattcttataagctagtggctccaggaactaaccaaaattccccggagctttagggctgctagcaggatatcataattaagcaaaagcccctttgggtggaagagattccaatttaggctagaagaatcccgtctgttcgcctcttcctagcattgcgtttccctatttcctggctgcagagtaccgttcccaggagattgcggaacgggacatggagaagagtaatccccagagtatacaaactcacagcgacgaccgaagacttcctcatcaatactctcgatcatcgctggctcaagggcctttcttggaaaagaaccttaaaaggcctggtgaattgagaactgcttttatttttaccaacgaaaaatgaacgacatcagattgcaggactctgcgcaattgttagggattggaacaatctttgtctaaaagacggcaacttaattatgatatgcaaccgcattatgtagagagtattcagagatagaaagatatcaaggcggttcaatagtaagatagtagagagagcacagattttcttcgatattctttttacagaagaggattcctctggctctttatagttatcggctaggccctggctctgctttcagtcaccgtctagcgtccgcagcgctgttatattgtcgcccaatgaaagctactgcggagacccgctcctacagcaagctggtaaggaagtaaaaccaatcctcactgggacaacgtggctgtctagctgagaaccgtcatctaatatgggcgactgcgaggtctcacacaaatacgggacactcacgctctatttcccagcgctcccagcgccccactcagatcgcgctaagctgaattgggtcggggaaagccattgttttctgggacatgatctgggaaacctttgcaagcaacaaatcatgcatcctctccagacgcgccaattcattctttgctacacaacaacgtggaataccacaatattagtttccactttgcatgtgtctctgtacatgtacaatgaatctccgaactgggccctagtctctactcgggactacacgtggctccagaatgggtcccgtgactttctaggtaccgctgaagtatgattggctctgttgtccttgtagaattgcactctggaccacagccacattttagcgcctgctcccctctttctttcgcctctccacgggaaaatgcatgtatgaaaggctcgcaagaagctatgtagagtgccaacctcgcgcttacaatgtccaagtcaagttctagtttccgtgacatatcatgccttgagatacagttacaatgcaggccgaaagatttaggtcagttaaaggagtctcatgcagtagcaatgtacgttcttggaccccgcattcactttggcgcctcggcaaagacttgggaacgcaccgcctgggaactctccatcctcttttcatttttatgcgttgcgtaagtcaccaaaagggaagaagataacatgggggccaacgcagcatctacaacggtccaagatgaagctgctcatcaatccaacgaagggaggagcagaggggaagagctttcatctaggacacgcgcgttctggagccgagagacgtgagtatgtcagtcttgaaatcgaagatggatgctgactgcagatttaaaagttttactggttccgcaatcttcaacctacttgccttcgccccacccgccggnnnnnnnnnnnnnnnnnnnnnnnnnnnnnnnnnnnnnnnnnnnnnnnnnnnnnnnnnnnnnnnnnnnnnnnnnnnnnnnnnnnnnnnnnnnnnnnnnnnnnnnnnnnnnnnnnnnnnnnnnnnnnnnnnnnnnnnnnnnnnnnnnnnnnnnnnnnnnnnnnnnnnnnnnnnnnnnnnnnnnnnnnnnnnnnnnnnnnnnnnnnnnnnnnnnnnnnnnnnnnnnnnnnnnnnnnnnnnnnnnnnnnnnnnnnnnnnnnnnnnnnnnnnnnnnnnnnnnnnnnnnnnnnnnnnnnnnnnnnnnnnnnnnnnnnnnnnnnnnnnnnnnnnnnnnnnnnnnnnnnnnnnnnnnnnnnnnnnnnnnnnnnnnnnnnnnnnnnnnnnnnnnnnnnnnnnnnnnnnnnnnnnnnnnnnnnnnnnnnnnnnnnnnnnnnnnnnnnnnnnnnnnnnnnnnnnnnnnnnnnnnnnnnnnnnnnnnnnnnnnnnnnnnnnnnnnnnnnnnnnnnnnnnnnnnnnnnnnnnnnnnnnnnnnnnnnnnnnnnnnnnnnnnnnnnnnnnnnnnnnnnnnnnnnnnnnnnnnnnnnnnnnnnnnnnnnnnnnnnnnnnnnnnnnnnnnnnnnnnnnnnnnnnnnnnnnnnnnnnnnnnnnnnnnnnnnnnnnnnnnnnnnnnnnnnnnnnnnnnnnnnnnnnnnnnnnnnnnnnnnnnnnnnnnnnnnnnnnnnnnnnnnnnnnnnnnnnnnnnnnnnnnnnnnnnnnnnnnnnnnnnnnnnnnnnnnnnnnnnnnnnnnnnnnnnnnnnnnnnnnnnnnnnnnnnnnnnnnnnnnnnnnnnnnnnnnnnnnnnnnnnnnnnnnnnnnnnnnnnnnnnnnnnnnnnnnnnnnnnnnnnnnnnnnnnnnnnnnnnnnnnnnnnnnnnnnnnnnnnnnnnnnnnnnnnnnnnnnnnnnnnnnnnnnnnnnnnnnnnnnnnnnnnnnnnnnnnnnnnnnnnnnnnnnnnnnnnnnnnnnnnnnnnnnnnnnnnnnnnnnnnnnnnnnnnnnnnnnnnnnnnnnnnnnnnnnnnnnnnnnnnnnnnnnnnnnnnnnnnnnnnnnnnnnnnnnnnnnnnnnnnnnnnnnnnnnnnnnnnnnnnnnnnnnnnnnnnnnnnnnnnnnnnnnnnnnnnnnnnnnnnnnnnnnnnnnnnnnnnnnnnnnnnnnnnnnnnnnnnnnnnnnnnnnnnnnnnnnnnnnnnnnnnnnnnnnnnnnnnnnnnnnnnnnnnnnnnnnnnnnnnnnnnnnnnnnnnnnnnnnnnnnnnnnnnnnnnnnnnnnnnnnnnnnnnnnnnnnnnnnnnnnnnnnnnnnnnnnnnnnnnnnnnnnnnnnnnnnnnnnnnnnnnnnnnnnnnnnnnnnnnnnnnnnnnnnnnnnnnnnnnnnnnnnnnnnnnnnnnnnnnnnnnnnnnnnnnnnnnnnnnnnnnnnnnnnnnnnnnnnnnnnnnnnnnnnnnnnnnnnnnnnnnnnnnnnnnnnnnnnnnnnnnnnnnnnnnnnnnnnnnnnnnnnnnnnnnnnnnnnnnnnnnnnnnnnnnnnnnnnnnnnnnnnnnnnnnnnnnnnnnnnnnnnnnnnnnnnnnnnnnnnnnnnnnnnnnnnnnnnnnnnnnnnnnnnnnnnnnnnnnnnnnnnnnnnnnnnnnnnnnnnnnnnnnnnnnnnnnnnnnnnnnnnnnnnnnnnnnnnnnnnnnnnnnnnnnnnnnnnnnnnnnnnnnnnnnnnnnnnnnnnnnnnnnnnnnnnnnnnnnnnnnnnnnnnnnnnnnnnnnnnnnnnnnnnnnnnnnnnnnnnnnnnnnnnnnnnnnnnnnnnnnnnnnnnnnnnnnnnnnnnnnnnnnnnnnnnnnnnnnnnnnnnnnnnnnnnnnnnnnnnnnnnnnnnnnnnnnnnnnnnnnnnnnnnnnnnnnnnnnnnnnnnnnnnnnnnnnnnnnnnnnnnnnnnnnnnnnnnnnnnnnnnnnnnnnnnnnnnnnnnnnnnnnnnnnnnnnnnnnnnnnnnnnnnnnnnnnnnnnnnnnnnnnnnnnnnnnnnnnnnnnnnnnnnnnnnnnnnnnnnnnnnnnnnnnnnnnnnnnnnnnnnnnnnnnnnnnnnnnnnnnnnnnnnnnnnnnnnnnnnnnnnnnnnnnnnnnnnnnnnnnnnnnnnnnnnnnnnnnnnnnnnnnnnnnnnnnnnnnnnnnnnnnnnnnnnnnnnnnnnnnnnnnnnnnnnnnnnnnnnnnnnnnnnnnnnnnnnnnnnnnnnnnnnnnnnnnnnnnnnnnnnnnnnnnnnnnnnnnnnnnnnnnnnnnnnnnnnnnnnnnnnnnnnnnnnnnnnnnnnnnnnnnnnnnnnnnnnnnnnnnnnnnnnnnnnnnnnnnnnnnnnnnnnnnnnnnnnnnnnnnnnnnnnnnnnnnnnnnnnnnnnnnnnnnnnnnnnnnnnnnnnnnnnnnnnnnnnnnnnnnnnnnnnnnnnnnnnnnnnnnnnnnnnnnnnnnnnnnnnnnnnnnnnnnnnnnnnnnnnnnnnnnnnnnnnnnnnnnnnnnnnnnnnnnnnnnnnnnnnnnnnnnnnnnnnnnnnnnnnnnnnnnnnnnnnnnnnnnnnnnnnnnnnnnnnnnnnnnnnnnnnnnnnnnnnnnnnnnnnnnnnnnnnnnnnnnnnnnnnnnnnnnnnnnnnnnnnnnnnnnnnnnnnnnnnnnnnnnnnnnnnnnnnnnnnnnnnnnnnnnnnnnnnnnnnnnnnnnnnnnnnnnnnnnnnnnnnnnnnnnnnnnnnnnnnnnnnnnnnnnnnnnnnnnnnnnnnnnnnnnnnnnnnnnnnnnnnnnnnnnnnnnnnnnnnnnnnnnnnnnnnnnnnnnnnnnnnnnnnnnnnnnnnnnnnnnnnnnnnnnnnnnnnnnnnnnnnnnnnnnnnnnnnnnnnnnnnnnnnnnnnnnnnnnnnnnnnnnnnnnnnnnnnnnnnnnnnnnnnnnnnnnnnnnnnnnnnnnnnnnnnnnnnnnnnnnnnnnnnnnnnnnnnnnnnnnnnnnnnnnnnnnnnnnnnnnnnnnnnnnnnnnnnnnnnnnnnnnnnnnnnnnnnnnnnnnnnnnnnnnnnnnnnnnnnnnnnnnnnnnnnnnnnnnnnnnnnnnnnnnnnnnnnnnnnnnnnnnnnnnnnnnnnnnnnnnnnnnnnnnnnnnnnnnnnnnnnnnnnnnnnnnnnnnnnnnnnnnnnnnnnnnnnnnnnnnnnnnnnnnnnnnnnnnnnnnnnnnnnnnnnnnnnnnnnnnnnnnnnnnnnnnnnnnnnnnnnnnnnnnnnnnnnnnnnnnnnnnnnnnnnnnnnnnnnnnnnnnnnnnnnnnnnnnnnnnnnnnnnnnnnnnnnnnnnnnnnnnnnnnnnnnnnnnnnnnnnnnnnnnnnnnnnnnnnnnnnnnnnnnnnnnnnnnnnnnnnnnnnnnnnnnnnnnnnnnnnnnnnnnnnnnnnnnnnnnnnnnnnnnnnnnnnnnnnnnnnnnnnnnnnnnnnnnnnnnnnnnnnnnnnnnnnnnnnnnnnnnnnnnnnnnnnnnnnnnnnnnnnnnnnnnnnnnnnnnnnnnnnnnnnnnnnnnnnnnnnnnnnnnnnnnnnnnnnnnnnnnnnnnnnnnnnnnnnnnnnnnnnnnnnnnnnnnnnnnnnnnnnnnnnnnnnnnnnnnnnnnnnnnnnnnnnnnnnnnnnnnnnnnnnnnnnnnnnnnnnnnnnnnnnnnnnnnnnnnnnnnnnnnnnnnnnnnnnnnnnnnnnnnnnnnnnnnnnnnnnnnnnnnnnnnnnnnnnnnnnnnnnnnnnnnnnnnnnnnnnnnnnnnnnnnnnnnnnnnnnnnnnnnnnnnnnnnnnnnnnnnnnnnnnnnnnnnnnnnnnnnnnnnnnnnnnnnnnnnnnnnnnnnnnnnnnnnnnnnnnnnnnnnnnnnnnntatccagatgacaagtctagtatggtcggatacgttaacgtgattgactgtgattttgatccacacgacccggaaaatgagtgttcagagcactacgatggatcgctcaggaattgtctgacatctgtcttccagtttgctctgtcttgtgagaatctgaatactggagaacaacaatggggagactgggggatggaacgtcctgggaaagtgatttatacagatggacattcttcactcgtcgaggaggaagacgttttcctttgtccgtccgattacgatcttttctctcgttcctgctatcctagcgagccgagaaaagagacgatcacggagtctcagtatcatgagcttcagagatctatcatctaggatagtcaagtaacttgtgtttgatttgtaacatcacaaatgactggtccatcacaaacttcgtatttcaaactggatcattcgtatatttagtgcaaaaatatacatgttgtgatagaaattgtttagatacttatcggcagactaactgagttcttcaagctcgagatcagccatgtaaatctctcccacgtggctctccagagtttccagagcatggcggacctcctgagcctgggcattccacataacgctagcctccggattgtgagtccatttattgcgcatttgctcaatcgcggtgttaacaaacctgcgacccgtctctagcattttattcgttctctgtttgaaaaaccggtcccaacagtctgcaaggtcgacgtccttgcccttctgtgctttatatgcctttgctgcgcggttcaattcactgcgaatgccgtcgttgaccattttgaaccgttctaagactctcggcatgttttggtagttgtagaccgcaatagtctacagtagaattcgaaatcagttttaactctacactcttgcgacttgattcgcgaactctaatccgaaacacactagctcatatttggaataacgttcgatccatgacttccaaaaatagacattgtattttacataacgcgggtaggactctgccttgtgtatattactcgtaaattccatacaatggtatttctctgccataccgcccactccagacaggaggcatcttcacccgtctatctctctggaatctcacaatgacctcacaaaatagctccgagactcccaccatccaagctacatctcatccgcgacataatagagagccagtcactgagcaaagctaaaatggccgaagaagcagaatgcagcaagttcacaatcataaatattcgcagaaacttacaacagttcggcagcatccacgcacccccaactcgcataggtcggaaaccaaccacaacaccgctaataatagacgcgctctgcgaccacctgtcggaaaaccgggcctgtacctcgatgagatgtctgtcttcctctaggatgagtctcgcacgatgaccacaacatctagcatcagaagagccccagtagccaaaggttggtctaaaaagacggcccgacagcatgcaaaagagcataatgccgatttgcgagaactttatctccataacttgttggaatttcagtcgtatcatcaagtttatatggatgaatctggatgtggtaagagggctgggtttcggcggacaggctggtcaccacttggcgtagcccctttacaggtatcgcagttacatcgcgaccagcgatatcagagtctacctacgtatacgcaggacgggatcgtcccctcgcgtgtatttcgcggtgcaactgacagcgctgtcttcgaaggctttttagctcagcttcttcagcactgcggacgatggccggagccttaatctgatgtggttatggataatgcgtcattccaacactcagagcgggtctcgcagatgtgcgcggagggggggggcgtgaaactggtatatctgccactctagtcgccgggcttgaatctgatcgaggagttttttgctgagctgaaaagctttatcaaacgtaactggagtcactacaagtggatcccgatcaagggtatgatgtttttcttgcttggtgtattgacacggtcggtgcaaagcaagagagtgctagaggccactttcgacacaggcttgaggatagacgtctgcgaaacttgaacaaattaactatgactttagccagatagaagaggtgatacagtatagtatttccggacatcggtgtcaccccctacactcttccgttgttccccactaaactactttcgaagatttctcagccgcacttgttttggtgatgctacataagttaccggattatcgtattagcgagtcaaatgtttactacctataaggcgagaagctgcaacctgagtgccccacgtcaacctttccatccctcatatggctgacttggttggcactcccactgtggccccgtgaagatcaattccgacgagttaggcagaccgcttttagtaaatgctttcgacttgacgagctcctcaagcacaaacgtaaagacactgccacccatgactgggccatatttcagacctagcagcagccaggtcttgaagccgaggtgagctagaaggggtactccccggttgttcgctcgcccaacctaggcggagagcaagctgatttacattttcatgtgtattcttgagacaaggctccatggtttctttggaaaataatactgatatatcattagttgatgataattctgaagctgatgattggacaaaagatctatgacccacaagctttcgtgacatctcctattgaaacgtatcgtaatagaacaaggggcactaattcgggggctcttctcgtgattgggctcgccgtgcgttgctgccaacacctggttggccacctccccctgtccccgcaacttgatatgaacttgaaggagcgcttttttgatctacttacaaggacacttcccctccaaatctgcttgaggctagttctatatgaccacgagctactccagacgcgaacttaagtcagtttatcttggatactcattcttcttgataatgtctactctttacggaagcgattcctccaaggaaccaaatgcctacgactactgcaatgatgcaactgctttgcctttacgccatcttcaaatgagcgaaagtatctccgcgcccaacacgttctcaaactttgcacatatacacccttcgcctataccatttgagacaaacttttgccttccccagttgtcagcttatccgtgggctccttatttgacaatgccgaaatgttcgctcgagatgactgtcggtgcttacgcaaacccttctacattcagtagtcaggctgtaaatagcgcgttgtccgacacctggtctacaaataatatgttgacgagagatgctcaagatctgtccgcggagagcactgaaccccttggaagcaggtatgtctccaatttatcctttcatggcaaatcgccaactgcctcgtcctaggaatataaaaagaaacaacgaattcaagtgtggttggaagaattgtaccagctctggaggattcgcatctaaatcctctctcatgcgacatattgaatcgctgcacgtttctccacgtggcttcgcatgccctcattgcagaaaatcctttaacaggaaggatcagctccaggcacacagaagcattgtacatgttggccgggactaactggcgcgtctcaaacgcaggggtagtgcgtcataacatgagttgaagattgttcagtactgcaaatttattatgctagagagggactagcagccaaacaatgtaccgcacaagtaaaatcgaaattggctttaatattcaatgaaaatcgcagtgaataacagtagccacaacaagaaaaagcatctttgtctaccagggtcagttctctgtgtaaacaatgcagctttctttttgatgtcaaaggtgtgtgagcgaaggctgtgtgtgacaaatagcccaagcaagatatgagagaatgaaagaagatcttgccagattgttaggattcccttttgtttgatctgtttgcacgatggattctatcggttttttacaagaaattgcggtactacaacaatgactcattatgcttaccagggaatacaatacagccctacatggattaacaggggaagagctagacttagattggcgtgtctccacttaaggtccgggaattaaatcagaagagtttagagttaaaactgatttcgaattccactatagcaaatcccagtcagtcatgtagctttcattttgtgttgtgacgcaacctacatcgcgtattagagtcaatgccttgcgaggatcctcatcctggaccatccccggccactttaatggatttcctggaactggatttaagctccaaagctaaacatgatttgttttaatacttgtccatggtgagtttgcagcggaaagagatgatacttacatcacctttgatcacattgatactctgtcggagcagtcggaatacttccttattggatttgcttccaaactgttccatgacgcgatcaataggacgtttcactagcccttcttgcgacattctggggatttgttctatctacttcccctggatttgacaacacgcggccattttgagctaacgaatggttgtgggaatgcggctgagccctcggagaaactcaacccttcatacagatggtgcttcattctggcatataacatatcctttttctttcctttattggtatctcaatggttacgcgaagccctctcatttggcccttagtcaaccacgttcatgctcgcaactaacacagcggacgggcgaagacatgcgttgatacaataccggtgggagaaacgacttctttacaaacgacttatccgccccactaaatgctagccatgctcacacctgctcagtgagcgggtgagatgatttgcgggtgaaattctgggggatgctgggaaatacatgtgaccatgttccctggcagcttggtgtttcgggaagacccatttgaaaaatgcgggggctcaagttacagtagtattcgaaatcagatttacctctacactcttagactttcattcccgaatcctgatctaaaacacgctaatcaaaatacagtatagacgtcgacccccttgttccaagcatagatcttgtatcttacataacgtagtggaacggcaccgactgtattttccatgaagattgctatacgcgggctctcttctctggtttctcccaggcaaacgctttttactctaccgtaactttctgagcatcatctaaagtgagactcatcatgtggccccgaaacttcgccctcacaatggcatcttctccgcgatataattgagagccagtcactaaccacatcctaaacggccgaagaagccgaatgcaaaaaagtcatgatcatgaatgttcgtagaagcatgcggcatttcggaagcgtccgcgactttaaccccaagctcgaatagaccagaggctggctgtgcctcaatgagatggttgcctgtctttgagaatattcagaacgccgtagagtttattagcatattccacagaatctagggccatacaaactatcatcttctccagagcccttctttcaaaaagatattagaaagcagaggaaggaaagaaaattgacattttgacatctgctatacacgaaatcctatgaaagagatctgccctgacgcgtggcccaaggcaagtaaactgccatttgtcgcggaacaactaggccgataaccaggaggaagccataatatattttttcccatctagctttatccactgcttttgctcgatgaggatgtcttgattcctatgaactgaattggaaacacgcttttcacagcagaactgaatgtgaaggtcgcccaagttagtgattagatatgaaccatcctcagaaaattcaagataatcgatgtatccgttgacattaagcgtcttctctagggcacccgtcgcagggtcccagagctttacagtcttatcccaagaaccagaggctagcagtcgtccgtcgggcgagaaggccactgactccaccgattttgaatggccctcgagagtctgttccagagtatgctgcaacgcgtccgtcgctgggtcccagagccgtacagtcctatcagtagagccagaggctagtagccggccgtcgggcgagaaggccactgaatcaactagacacgaatggccattgagagtccactttcgcagccccgtcgttggatcccagagtcgtacagtcttgtcccaagagccagaggctagcagctggccgtccggtgagaagaccactgaattaactggagctaagtggccctcgagagtctgctccagcgcgcccgtatttaggtgccagagctgtatagcccaattactcgagccagaggctatgagccggctatcaggtgagaaggccactgacttgactagacctgaatcgtgtttgagagtacgttgtagcgcgccagtcgccgggtcccagagccgtacagtcctatcagtagagccagaggctagcatccggccgtcgggcgagaaggctactgagttgaccggacctgggtggcattcgagggtctgctgcagcgcacccgtttccgggtcccagagccgtatagtcttatcccaagagccagaggctagcagttggccgtcgggcgagaagaccactgagtcaatcggtcctgagtggccctcaagggtctgctgcagcgcgccagtcgccggatcccagaactgtatagtccaattactagagccagaggctagtagctggctattaggcgaaaaggctactgaatcgaccggacttgagtggccctcgagaatctgtagctctggactccaggtttcctgtacctgtggtagccgagaacaccaattgggtaggtatgtcttaaaatatcttcgaattatcgcctttctcggtgtaaacataagtccggagcagtaaagttgaaggggtgcaacctcggctatctggcggcttttctgcatgaagcgctttgcgtcatgcagaaattcggatattggggaatcaccggtgtcctatacttgttaagttaattttattgtgtgtgacaactttcataggaactcacagctgagactctttgtaatagactaatgctccccaaaacatcagatacatagcctaggatgctcattgattccacccagtgcaaaaaatgctccttcagaaataacagtgccttagatatcataaaatgtaggtccttactccgcacgaggtgatgcacccaatagcgacaggagtattgtaactctgcgctgatagagttgtggatagtctcgggactaatctccgcacatgttgtcccatcacttggtagaccacatatattctttctcagatcgtcacatataccaaggcaacgtgtagtcaacttctgttgtgtctcttcctcatctacccagaaaggagtttcgtctcgcatctctagatcaagaaggaagtcccgaaatgatagatgaaaggtgcgtaatggtaaattaatatcctctggtacactcaaaactgagtgtagcgatttcagcctgaggctaacccgcctctcagggagaccaattagtcttgaaagcgaggtaactggtagtggactttcaagcatcacgatcgcaccaatgacagtttgaaattcctcgaccagttgtttttcctgtttcttgctctgtcctttaagaagtcgatttaacacaggaagatacgtccctttgaattttgatccatcactccgatgtgtgagaatctctgccagactatcgaccggatcccattgagggtcctcaaatatgcggcacacggtagcagcaaagataaatagtggtactgataatgcaatgagagcctgtaaatctctgtctccaggccagtcaattggtagaggctgaatcttccgaatctgtccaagtctgtgattcaagaagagcgatatatcatgtgttgtcacagcctcgggaatctgatgaagagcgaggtcccggtagtcatcatttttcatctccgaaaaccctagacgaatagggagttctggtcgactggtcaagaagatccgtaagcccagagcatttgaatgctgtagatgaggtagtaattggagtatggctcgtatgtcatcgtcttgttcacattcgtccaatgcgtctatcacgattaccacggtccgtatcagatgattggattgttctaatttcctgattggtcgaagtagtagattgtcgaattgttgcttaagtgacttcatcccaatgtcgggctcgtcatagatcgcttcttgaaggccaggtattagttgagagatgttcttcgccatttgtcttgacacagtgggaaacagcttcattgcattccctctatcagcctcgcccctcctgaaaaaaaagcttgctcctagcaaattttcctgtttgaagtgtttggccactgtgcgggagacggtcgatttccctgtcccagccatcccctttaaccagaagatacattttccctgtggtgacatagcccattccgtaatgttattgagaaggtcagtcctagttcctagaaggcattcatcttcatgccggtccatataagagtcgaactcagccccatgcgcaataggtaacttgtccagagggtctgcattcgatcaataaagtcccccgagttgaattttgctataatgtacctgcgttgagactgaactgagcattgattgtgccattattgatggctgtttgcattccagaattatggtcatgaaaagatgtcgtagacgccatgattatgataacaccatagcattgttcggtattcaggaggaacatatgggcggggtagtagtaatagtggggtagcctcgacctatcgtcatgtgatgcctcattctccatttggcggatggggatttcaaactgcgcgcgagctagttaatctcacttcattttacgtgatccagcatatacattatttctattagatgtcaaattagtgtagacgaaggctgtgtgacgaagataccaagcaaggaaggcaagggcagaaggaaatcctaatgatctggaagtttgatctgcttacattcgagaacttccatcagcttccaccgatcattacgatactagaacgatgacgcattaattgttactagtggttaccatacagtcctacaggggaatgtctaaaattatactggcgtgcttcaagctagggttcgggaatgaaagcctaagagtgtagaggtaaatctgatttcgaatatcactgtactgccagctgggaaaataacagacgttataaatctaaagctcgattgcatgacccaagttatctcacatccatagcttagatacttcggtctactgaaagactctgcaagagggctgatcaacgatgtaatattgtgtcatgtttcatgaagaggacaagcacagcagttttaaggcaaaatacacgctgatcaaaatttgcagggatgaaatctgttctgagagggcgaggaatatgacacgtcttgattaacagcagatagccacatttgctgctgatatagcaagtatatttatttatcccatattcgtggccaggatgctgtcaaagtcaagaaatttgaggggcatctagattattaattgtatgagtatttccaataaatttcatagcagctcaccatttgacttgttacaatacagacacacacacacacacacacaattttgttacaatacagacgcgctcgaaatcagtttcatctctttactgtcttcaattcttttttgaactctattttgcataataccttaccatataaggttagcctgtccctgacccacatctcaggcagtatctcagtacagtaatgaatgattgcctaaaaatagcggttgtatcattgttgtattctccccaccctgtctagaaccagtcacttacaaacaaaccaaacaagccaaacagactagttaacaagagatttgcttgttgtctggctactctgcatcccccatatatccaccttggctcaactgccctctttcacaccccaccgaacactggctgagagaacttatactgagatacgaaactggtgggtagacgtttctttgcgaatccgctcactcacacgtactggcgccacaactgcactatggccacccttctatggtcacagttttgttttgatccgcacaagcgatagtggtagcccccacgctcccagctgatgtcgtggtagagttgcttggcgttggttttaatctgacgcctctcaccagattctcatttctttctagaacatatggatcccttcagcattaccgtcggtgctcttggcatcacacaattcgctatatctagcatcggtaacctgcgcgaatttatcaatggccttgacgaagcaaaggatgtgatgcaggatgtgacatctgatttggaagccatacagcttccgctctatgcgctcgagaatctccagatccctgatgataagacatatgttgcagcgaaagcagatctggagaacactggtgttgctgaagccgtgaataaatgtgggcaggcatgcgcggattttactaagaggcttgagcagtggacaaaacattccaccacaacgaaattttctctcagagatcgattgtcggtaggtttatggaacaaagaaaagatccggacctttaggacacaggtccgttcttgtcaagccatcgtccaatttgcaatcgacagcactcagttgtacgtgaaacgtctttgcgctagagaagaggcgctaattaagagcttgaagaattatcctgatccggtccgaaaatgcgtctaaaactgcacgccaagagacagagaaacaactgcgatttctcgaaaatactattcaggagcacatcaacattacaaagagaaagcaagacgaagctcttcagcgcaagaacgcgctcgaaaaccctgaggatgaagatgaggacgatgacggcggagctcagcgaactctcgccatccaagagaccaaagagcaggcacgtttgctagaaagtgaccaagctgcctctggaattgtttcccagatactcttgaaattgtccatcccggtggtcggcaatacatatgaggttactttttcaggtagtcacaatagcggcatgcagatcggccatagtacgggtactatcaactggaatggcagtcgtacctaaaggagggtcatctgtcggatatgtctacagatgatgaatcgaaacgccatccttagggaccttatcagcgtctggcgtctgtttataacttatgtcgcatgttacaatgcgctttggattctcctccatagcttcctagaccttgtgacctgcagctataatttagtctatattgctatgcagttgacgtaaactagcgattttgtcctttaatcactatcgagccgactgtttgactgacagattaaggtgatagcctacttgagacacgaatttgtcacccaaaggtgagcttcgttccaagagagcttcccataagagccgagccatctcattctctacggcttctaggaatgatgcttcgtcgtcatttgatgcgaccagcaggggctctgacatttcaagttggtgtcaagaaacagggtaatactgtctttttaccatgtaaacatgtgactttttcactatgtatttgcttactaattgtgtccgaccagattgtcaaaaccggacaattgttgtttttagttagagaattgtaccattgcgaattttacccgtacgttcgccatacaccaaatttccgtcatatattatgacatgtatagtagatcagagatagttgccctttcggcttacgggcgttaatatattgtgtgtgtaccatgaaaaattgaattctccatgctcacccttgctcacccttctgcccagtgagcgaaaagaaatgatttttgattgagggtgggggatgctggggttttgggaaatgcacgtgaccctgggtctcgtagttcccaggagctcggttgcttctacaaggacgattgaaaactgcgcgggccctcatttattgatatcatagatgctagcttacgtgcctattcttttcctttgagggctaggccactcactgccaagcgcgtatttttgaatggttaatagatccagagagcagttgtatgactcaattaatcttcctaatactgaaatgccctgtaagagacctcattaacgatgatgtaaaattgtgttctcaatatgcatagcacataaatagaggtaaatgaagattaaaagcgagagagggaactgagttccgagagggagaggaataatatacgacttgaaggacagcagattgccacagttgttgcaaatatagcaaacagagaggaggaggccgggcgatactcagcaggcaaccataggaggttgactccgttatgggttacccaggaaaagtcgctattcaatccaaagccacgtatttctgggacggactttgaaaggttggaagcggatgtgacaaatgcatcgcttcggatattgactgtaccgattgtcgtatgtagaaaattatggtcgtgtttataaaattgaacaaagccaggagagttgatcagaagtgtccattcgcactggccggtggccgaatcccagatcctgactgtcttatcatccgagactgatgcgagtcgacttccacaagcagaccatccaatagagctgacggtatcactatggccctcgagattcaatttacactgaccggtggagggatccaagatccttattgtgtcatccaaagacgccaatgcgagtcggcttccatcttgcgaccaggcaatagacctgaaccaaccactgtgcccctcgagagttgatacgcagtgacctgtggcaggatcccagatcctgactgtgttgtcaaatgatgtagatgcaactcggcttccatcttgtgaccaggcaaccgagttgacctgccggctatgaccctcgagcgtcgatgtgcaatggccggtgatcggattccagatcctgactgtcttatcccaagaagctgatgcaagttggcttccatcttgtgaccagactattgacgtaacctcgtcgctatgccgctcgagggttgatgcgctgtgactggttgctggatcccagatcttgactgttttgtcagcggaggctgatgcgagctgtcttccatcctgcgaccagctaaatgagctaaccggagcactatgcccttcgagggttgaggtgcactggccggttgctggatcccagatcctgactgttttatcaattgacgctgatgcgagtcggcttccatcttgcgaccaggcaaccaagcggaccgaatttctatgccccttaaggattgaggtgcactgaccggtgatcgggttccagaccctgactatcttatcgtttgaccatgttgcgagtcgatttcccccccgtgaccagacgatcgacataacctcgtcgctatggcccttgaggattgacgcgctgtgaccggttgctggatcccaaatcctgactgttttgtcagccgaggctgatgcgagctgtcttccatcttgcgaccagctaactgagctcactgaggcactatgaccctcgagatgtaaaatacactggccagtgaccggatcccagatcctaactatgctatcccgggacgccgatgcaagtcggcttccatcttgtgaccaggtaatccaggtcaccggaccaccatatccctcgctatgaaatttctcaacggtgaatatacacctgctggtggccagatcccatattttggctgtcttatcctcagacattgatgcgagtcggcttccatcttgcgaccaagcaatcgctatgaccgatttactatgcccttcaagggttgacgcgcactgacctgtggttggatcccagatcttgactgtcttatcatgggatgccgatgcaagtcggcctccacctggggaccacgtaatcgagttgacagaactactgtgcccttcgagtgttgacgtgcactgtccagtggttggatcccagatcctgactgtattatcagatgaggctgatgcgagtcggcttctatctttcgaccagtcaatcgagttgacctgatgacaatgcccttcgagcgtttgaaggcatggactccaatggttatcggccactggctcattcaaaacccaacttggactctcgttttgataacgtttccttgtgatactctgcagtgggctgaagataagggatgaacagtacagctgaagggggctattctgaatcaccagcctgtggtaacggatgaatcgggaagcgtcccgaacttgatgtaaaagggcctgtggctccccccttttctattttagccatttcactgttagaagtggagataccgtttacataattgaagacttacctgaagtaatccctccagcctcaacatacctactataccttgacagaggtttcctagaatgctaagggcttccagccagtgaaggtacttttgtcgtaggaaaacatccacaagccctccctcatcgaggctaggatcgccgctttcatggtagctgccgtcctgtaaatgatctatccaataaacacaagcgtattgtgcatgtgctaatggattcgtgctaggctgtccaactttatcaattgtgaatccaggaaaattgatttgcaagatatcacggcgaagtgtctggaacatgacttgaaaagaccgcaggaaaattgcctggtgtccagcttccttccctctgggaaagatctcgtcttgggcctcactgagtagatattccttcgcagactgatgaacaaaaatgatagtgtcatcgcgtaatgtcagaaatgagccacaagtcgatatgatctctgacaggatttcattatcacttaggaggtcattaggtaattcaataatggaggccagttcttgaaatgcaatagggcgatacactatcgacatactagccagaatttgcttgcagagttcggcatcttccgagttgcgaacctgatcgatcatccgaccatacaacgcattaagtccaggaggaaatgcctccagcttcttaagagcgtgcctccgcgatgttctatcgaggtcttgacagactaaggctacccaaaggaaagtgccttgcgagttgagtgacaagtaatggcatatcgtatctcgagtttcgtcgctgtattttttaactctcgccagatggtgaaccttatgttgaatgaatttgcccacggcttcagatactaacaactcattcagctctaatgagatcggagtggtctggatagtgtcaagacgctcttcgatatcggaccagttgcggctcgagacaatccactttacttgtgggtaagcagatgatatctgagcaaccaagtcgagaaggggaagtaggcccgatgtgcactcatccagcgcatcgataatcaaataggtgctctgtagggccgggtctttcagaatgtctgtaaaaatcctcgagagggcattccatgcgtttatgtcctcaaacaatgcttttcccgctttatcataccgtcgctgcacatgagagagaagaagtagctgcttctcgacaagcgaatatatcaagccacggagaacagcggtggcattattgattcgcacgtctgttgcttggcaaaagaagaacgagatattcgcagtgtccccaaataatcgtgttaattcatcgatgataccgcacagcagcattgtcttgcccttgcctggatcacctttgatccagaggaggcagttgttctgattgtctcgccattgttgaaactcatcgttgtcgagaacccagcagtatgaatctttgagcagccctccgttggtgttctgaatacggtctttgtcatgtttaggatcagtcgtccgtagatcccgcaagcacgcttgattccatgatgtttccgattgtacttgggtatcacaccgattagtcacgctcctttatagttatgcgttccactcacggaactgattagtgatatgaccaagattctgtccaacttggaacccagagtttgaaccgccatatgatgtcgtgtatgccatttttgcagccaggtgattcttagaaggggcagtcgcgagcatatggctaagtcgttgtagtaccttgtaccccgctatcaggtgatctatcaagcgacactaggaagcagagactggtagttttggttcaggctcctcaatctgtcgagacgcaatacgtataatttacttcattggggaactttagtcacttcggctaatgtttattaatccaccttgcacaagaatgactgctgtcaatattggagtggtgactcgcgaggggcgtcgagataaaggtatcaatcgtatgtttatttccaataaattactgagtagctcatcatgtaaattgaagttacaatacgtttcgatacactcagctggcctaaacctaacgcatactagcgtgtttcaggataaagtttggtaaagaacgaaagagagtaactaaagtggtgaaactgatttcgagcgcgtctgtacatttcggatccgtcctgtatgtatctatctgaacccaaaatcgaacagaggcgaattccgagacgagggatagatactgaacgaaggtggttgatattaccttcgatatatatattcagctgtggttgtgtgccgagcgggaactaaccccggaccgacgatggacccacctatggaagggcccgaaccccctcccacaaacacccaagaaacccccaccagcttctccgtggaagatttccagcccagagtaaacatcggatcccccgaatcccctaccgaaagccgtaagcgaacacgcagcggtgatgcgtttgcaccatcggaaaactcgggtcgagtgaccaccaaggaggtgtggaaactcatcggaaccctgaaagacattatccgccatcaaactgcggtcatcgaatccactcagaacgaactacgggagattaaacacaatcaacatgtcctgcaagaacagaacgagaagctccatgaggaagtgaaagcgttacgagcacaggttgaaagcgcccctgcagtcaccgcgactaggacttgggcagcagtcgcagccactggcgataatgccacaccctcgctgagccaccagaaacccgagaaagagcaaaactgcgtccgaatcagcacccagagagcctttgtagacccaagagataatgacaacaacgacggaaacgcgtttgggcgatatctccccacagataccgtcaacacccacatccgcacagcattgcagagcgacgctgcaacacaagacgcccaagtggtaggaattggcaccaccaaaaccggctatctcattcgattcaagaacgtggagtcggctcaggtggctcgcaacaacactgagtggctacataaattgggcaacaacacgaagctggttaaaccacggttcggcattgtagtgcaccgcgctccaactgacgaatttgacctggaaactggtactgcccaagcagcagtaaaaatcatccaagagaacgacctggcagaacacggtttccacatcgaagaactggcctggatgaaagcgaaggacaaggccctagggaaattcgcatcgttaggaatctggtttgactccgcagaaggagcagaacatatgctccgtagcggtttcgttgtcagtcaacactacatccctcaggtagagcgatgcgagatcaagaaaaagagatgtttccggtgtcaacggtttggacacctggcatggtcatgcaaggaaaccccgcggtgcggacactgtgcaggtcaacacgagcggcagcgctgcccaccaggaatcagggcccgctgcctcgactgtgggggtgagcacgccaccggagatcgacgatgtctaacccccgcgacctctcaccccaaccgatgttagagagcaacctacgcatccttcagttgaatatcatgaaatcaggaccaagaatggaagcactcatcaatgaccaccaaagccaagacctggatatccttctgatccaggagccatcgatcacaacctaccgcacacatgtcaaccacagcgcctggcgactatatcgacccaccacacagaccgacgcagttcggtttcgcagcctcatctacgtgaacagacggatctccacctcctcacaccgtcaagttccctgcaatcacccagatgtcgtagccatcaagatctggacgaccgactctcaaactcttttcttttctgtctacatacctccagtaccgctctttacggtcgatgacgcgtcagcaatgccggtgctcactgcaatagcaaacaccatcacagccgctgtacagaacgagcaacgctctacaagcgtcattatcacgggcgacttcaaccgacatcatccgatgtggggcggtaatcgatccaatgtggggcaacaactatatcgctcctagattcattgaagacgccagcgacctgatcgatttcttccaagcccacaacctccacagttgtctccctcgagggacggcgacttactgggcattcaacaactctagacagaactcgaccattgaccagacggtgacagataacccggacttgctcatcaaatgctatctgtatcacgaaaactatggatccgaccaccgtgccacctatccagaatggaaccttcaactccggagcaggccaaacaccaaagcaaggaaggcgtatgagcgcgcggactggactaggatcggcgaggaagtagtccgacagatgaacccatggaagcagatcaagacccggccaacactcgaccgggtagtggaaaaccttacagcggtgacggcccaggcggtcgaccggttcacacccgacacacgcccgacgccatactccaagcgatggttcacgccagatcttaagacccaacaagtcgaagtcaaccaactgcgtaggaggtggcaggcaaactgcgccgagctgggaagagagcacgctaacaccacggctgccttcgaagctatgcagcagaaacgacgagcgtggacgaggaccatcgagaaagccaagtcctcgcactggaagcagttcctagacgaagctggtgaagggaagctctggaaggccgcgacatacatgaagccccgagagacatggggttgtgtcccagcactgcgagtgggctcggacgattgcacccaaaatgaagacaaagcgagggcattcatggatgcgttcttccccgccatgaatacacccgaaatcagcccacccaccgcaacggagacggaacttcagtggcatccgattactgaattggagatcgagcgatcactgaaagcagctaaagggaatactgcacccggggaagataacttaccgatgctggtctggaagaagctttggaagtatctaaaggtctttattgtgagcatcttcacagtgtgtatagagctaggacaccacccgagacagtggaggagcgcgaaaatcatcgtcttacggaaaccaggcaagcctgattactcggcccctggtgcttaccgcccaatctcacttttgaacacacttggcaagctcctggaggcagtaatggcccgacggttatcctatgtggcggagaaacacagcctgctaccaaacagccagttcggcggacggccgggtaggaccaccgagcaagctctactagtgctgtccagtgcgatcgacaaagcctggtacaagcacaaggtggtgaccctaatcgccttcgacctcaaaggtgccttcaacggagtcaataagacaagcctggatgcgtcgctgcaggcaagacggatcccgattgtggccagaaaatggatcgcaagcttcatgagcgaccggcacgccaacattgggtttgacgacttccgcactgagactgctccgctggtgaacgctgggctagctcaaggatcaccactttcccccatcttgtttgcattcttcaacgccgacctagtcgaccagcccgtcgactcccagggaggtgcgtcggcattcattgacgactacttccgatggagaggnnnnnnnnnnnnnnnnnnnnnnnnnnnnnnnnnnnnnnnnnnnnnnnnnnnnnnnnnnnnnnnnnnnnnnnnnnnnnnnnnnnnnnnnnnnnnnnnnnnnnnnnnnnnnnnnnnnnnnnnnnnnnnnnnnnnnnnnnnnnnnnnnnnnnnnnnnnnnnnnnnnnnnnnnnnnnnnnnnnnnnnnnnnnnnnnnnnnnnnnnnnnnnnnnnnnnnnnnnnnnnnnnnnnnnnnnnnnnnnnnnnnnnnnnnnnnnnnnnnnnnnnnnnnnnnnnnnnnnnnnnnnnnnnnnnnnnnnnnnnnnnnnnnnnnnnnnnnnnnnnnnnnnnnnnnnnnnnnnnnnnnnnnnnnnnnnnnnnnnnnnnnnnnnnnnnnnnnnnnnnnnnnnnnnnnnnnnnnnnnnnnnnnnnnnnnnnnnnnnnnnnnnnnnnnnnnnnnnnnnnnnnnnnnnnnnnnnnnnnnnnnnnnnnnnnnnnnnnnnnnnnnnnnnnnnnnnnnnnnnnnnnnnnnnnnnnnnnnnnnnnnnnnnnnnnnnnnnnnnnnnnnnnnnnnnnnnnnnnnnnnnnnnnnnnnnnnnnnnnnnnnnnnnnnnnnnnnnnnnnnnnnnnnnnnnnnnnnnnnnnnnnnnnnnnnnnnnnnnnnnnnnnnnnnnnnnnnnnnnnnnnnnnnnnnnnnnnnnnnnnnnnnnnnnnnnnnnnnnnnnnnnnnnnnnnnnnnnnnnnnnnnnnnnnnnnnnnnnnnnnnnnnnnnnnnnnnnnnnnnnnnnnnnnnnnggcagatacgacagctctaccaggcatgtatcgcacctatagtagactacgcatcgacggtctagcatgacccgcttagagacaaagttcacatccgacacttgaacacagttcagagaaacgtgctgatcagaatcctgtcggcgttcaggacggtagcaaccgcgaccctagaggttgaagcctatatactccccacgcaccttcgccttcgccaccgagcgcagcgcacgattgcgagactgcacactctacctcgcgaccatcccatttggagtgctctgtcaagagcccagaaccgtaggaacaatgtcggatcatacgcccgcttcccattagcagaagcgctgaagaccatggacgttgacaggctcaacgaactggagatgattgacccacgcccgctaccaccgtggcgaaaggacgccttcacagagattgagcttgaacccgaccgagagacagcgagagatagggcggtgtccgcaaaggacacgtcaaacatcgtcgtctactcagacgcctccgggcgtgagggccatctaggagccgctatcgtggccctgaacgacaatgatgaggtgacggaatcccaacaggtgcaagtggggtcgatggaacggtggtcggttcatgtagcggaactcataggcatcttctacgcggtcagcacggtattcaagttggctcaccaacgcacgagcgtcggaaatcatatacacgtaacagcaacaatcctttgtgatagcagatccgctttgcaagcaatccagaatgtgaagaatagatcggggcaacgaataacccacgcaatcctccaagcagccaccgaggttcaagcagggcatattgccctccgtcttcagtggatgccgggacattgtggaaacgtcgggaacgagaccgcggatcgactcgccaaagaagccgcacaaccgggcaaaacccatcctttccggccgctgctgacgagagagaacgcctttctccgcagcaagacccatgctcagtgggagcaggagtggaagtcaagcaccaaaggtgcgcacctacggaaggtggacggcgcgctaccagcgaggtacaccaggaaaatgtacggaagcttgcccaggaaccgagcatacctgctcactcagctgcgcacgggccacaactggttatccacttacgccaagaaatttggcttccgggacgatgatcgatgcgagtgcggcgcgcaggagacggtcagccacgtgttgctggaatgtccaaaactacgagacttgcggatagaattaagaagaaatgttggggacgcgttgaacagcgtgtcgagtctgctgggaggctcaaacgaaggtgtgagaggtaagccagacaccgtctcgagggcgaagacggttcaggccgtattggacttcgccgaggcgtcacagaggtttcgcagtcgtgcgccacaagggcagcctaacagcgggagcggcaataggccagggcaggccgtgacgaggctctaagattcagtcagaaagtggatcactctacatgtacatactcggatatatagtcgttgtatactgcatatcgctttgcgaggggtcagtgtaaatgaattctactactactactactactactacgtctgtacatttcaatgacttgaaatttgctaaatcaaaaacagactagcgtgtttcaggatttattttgggaaagaatcgaagagaataaagtggtgaaactgatttcgagcgcgtctgtacttactccttcggaccttgcaaattgctgatagcccgataaattctcatttgaggatgagtcgttgggatctgtcaatatcgaacaatatggctcagatggtccacacccccattgctgcatgaagccttcctcctgggacatgttgtaattcccttattaacgcaggccaaacaataaagaggcaaggaaaacgagtgtggggaggggaggctagtgtacaaaaatgatgggacgcctaggtgcgcagcacctgagcagggaaagccaaagctttgggggggggggaacgtcggggacaaaggagacggaagatgggactggggggagcgaccaatttaaggccaaggtgggggcaaggcgcgcgcctggaggaagggagggggaaatgctaaatcgaaggttctagtctccaagcagcgaccgcaagtggcttgtggtcgcagagtcaggcggttttgaatcgcgaagttggacatccaataggctttccccacgcacctccactaccgcaacaagtcgacttcatacataaacttcgaggaagataaaataatttctctggacgcttcagcaccatttgtggcacggccactctcacactggaagtctctggtcgtaaagaaaggcctctcgagaaaggagaaaacggttctacgtcagtgtggagacgatttggacgatctcagatccacaagacccataactcctttttagctatttttagcttggtcaaggtacccataaagccagaccaaaggccttcagcttgaaagagtatatctgcctaaagtagcatacccaaagtgtgccacaagcaaaaaagtatgcctatatcattcacttactatatttaggcgcatcccaagcaggcgcgcttcttctgatagagcccgtcctgggacagaccacggttttccctcctcgaagctatcccaagtagggttgcttcttctgatagagtccgtcctgggacagaccacggttcttcccctccttctacactatcccaaatagggttgcttcttctgatagagtccgtcctgggacgggccacggttttccctccttctacactatcgcatgcagatggaccccaggaagcaccaaactctccgcattacagtaaagcaactgcgaaatgcagaagggagaagttgacactttgccagttaggatgttgctttgtttgtgctgtttgttgcgtttgcgtggaatcttcttggtagtctagccttctaattataggctcttatatctgtcttacaatctacagtcatgttgcatgagtatttgcacccaagtacttcggaagccccacttttcttctgccggttaaaccctctcattgaaaaatatatagctaactagctagtaacaagtatgccaaccttcacatatacgctcacgaacgtatggtggaagctctggactggggaaaaaaagggtagtaacctttataatactatagtataatacgcgcatgtcggatagggtttatactagtagtaataagcaggcggtaaaaaagggcggtcaaagatggaggtactggggtgcgaatactcatgcaacgccactgtataaaaaggaattgggattattacgagtatgtacaaaacgggtatatttactgcatcatgtgctttcctcaaaacataatcaatagtcgcggcaactctatgctcaggctctagattgccgcagccttcaatttcaaacatcctaagaagtttctccacatttttctcggcgatctgtcgggttcccgtgaggttatccgtttcaaatctgagatactgtaactttataattgcgcatccctcataatattttagtcgatggagggcgaggctgtttgttcggtggccaagaaggttttcgcttgcttccattctcttaatatgttttgttttgctttaaaggaaagaggacaatagtctatccgaaagaatagaaaggacggccataataatttaaatgtacctacgacactgaaacccgtgtcgcgcttttgccgcacccccgagccctccggtatggcccggctctccagtgtctctagtgcgtccctactctctagtacgtccctactctctagtgtgtccctactctccagtgcgtcccgactctctagtacgtccctactctctaagccccccgcaggagtataggttccggcaggagtataggttcccgcaggagtgtaggttcccgcaggagtgtatgttcccgcaggattaagcctcccgcaggagtgtaggttcccgcaggagtatgttcccgcaggattaagcctcccgcaggagtataggttcccgcaggattaagcctcccgcaggattgagcctcctgcaggattgagcctcccgcaggagtataggttcccgcgggagtgtaggttcccgcaggattgagcctcccgtagaagtgtattgattacctgttcaagatcccacgagtagggccctcgcgttccttggaccatattcgaccgtatgacccatggcatggtccctaggcacactactgattgctcccagagtaggaatcataattcccggaagatatacagctcctaggattgaaatgtatagctccggggaacgaaaggtggtaccctaggagcttcgctcttactttctccgcctgagagacggacttataccgtcattcctccgactaagcggacgaaaagggggaccagatctttgtaatttactgggaagggatcctaggcgcctataagacacccctcttaggacatgcgtagacctatatggcttgaaataagagcgtactactgataagacgtatggcaccccgcgagaaatctaataggagtggtactgggatgagagactgcttttgtcactatgatagagctatgtagagtatcctagaggtggtaatacgaaaggaaattgataacagataaagactatttttagctagcttatttcaaaagtgagggtcacttagaaggctgaggataagagacctctcaaaataggtacctactcgtgatagaatcctcttgagaggaaattcgtcacagtatgtcccacagaagagccccagcaacatagaagggaaaacgttatatgagctggctcttggtactactcctctcctagtccacttattctaggtttaatccagtctcgggatagtctagaggcgaccagggaatacgcacgacggttctcagccagatacccatgctgtcctagtgagggctggtgtcattggcttatcagctgaaaggtgggtccccgcagtggcctttgatgcggcgatcgaggatggcactaacacgatatttatgacattcggcgacgatctggctgtgagtgaaaaggcggcggattcgatcacacgtgcactcaaagccgatagtgatcataatcggccgacaagaccccggcagaagatgataaataatgcacttgagatctaggtcaaaatacctgtgacccatatagaccgtagtcagaagaccgaggacccttatggccactaagccagggtggccgccagttgccagctctaaagcctatctagactaggggctgtggacgtatgtccaatgtggacctgcgtccacggctgtcggtaattggccttgagtcaactgttctggatcacggggcctagaaccaaggccttgcggtcgcagctccctaaccacggacgcacatctccaggcctgggactaggggggacgccagttggcagccagagggctcgccaggatcatgggccatggtcgtacgaccagataggacttagacctatgaaccctaggaacaagatgtggggctcccgggaatgccgatcgagttccccggaaccaaccacagcccaggaacgccagacgcgctcctaggcatggatcaagtgatcccagaaacacctcgtgtcctcgaggaactctaagtctgatccctaggagcgaccaagagcgtgcctaggaaccatactatagatcctaggaatgagagtcctggtaagggggtctagaatacatagctataaccaattttagaaatacaaattttagaacgcgggcaataagagcggcaacagaaagaaggcctaatcattgaatattattagccaagcggcactctacctcaaatctcagcccccttccgtactgtagggggaactactggcttggatttgatgcctgtggaatctgacataaaagttggcatgccatggaggattttttctaggttggtaggatgaaataattcttacaccagactttgggggggggggggggggccgggggattaggnnnnnnnnnnnnnnnnnnnnnnnnnnnnnnnnnnnnnnnnnnnnnnnnnnnnnnnnnnnnnnnnnnnnnnnnnnnnnnnnnnnnnnnnnnnnnnnnnnnnnnnnnnnnnnnnnnnnnnnnnnnnnnnnnnnnnnnnnnnnnnnnnnnnnnnnnnnnnnnnnnnnnnnnnnnnnnnnnnnnnnnnnnnnnnnnnnnnnnnnnnnnnnnnnnnnnnnnnnnnnnnnnnnnnnnnnnnnnnnnnnnnnnnnnnnnnnnnnnnnnnnnnnnnnnnnnnnnnnnnnnnnnnnnnnnnnnnnnnnnnnnnnnnnnnnnnnnnnnnnnnnnnnnnnnnnnnnnnnnnnnnnnnnnnnnnnnnnnnnnnnnnnnnnnnnnnnnnnnnnnnnnnnnnnnnnnnnnnnnnnnnnnnnnnnnnnnnnnnnnnnnnnnnnnnnnnnnnnnnnnnnnnnnnnnnnnnnnnnnnnnnnnnnnnnnnnnnnnnnnnnnnnnnnnnnnnnnnnnnnnnnnnnnnnnnnnnnnnnnnnnnnnnnnnnnnnnnnnnnnnnnnnnnnnnnnnnnnnnnnnnnnnnnnnnnnnnnnnnnnnnnnnnnnnnnnnnnnnnnnnnnnnnnnnnnnnnnnnnnnnnnnnnnnnnnnnnnnnnnnnnnnnnnnnnnnnnnnnnnnnnnnnnnnnnnnnnnnnnnnnnnnnnnnnnnnnnnnnnnnnnnnnnnnnnnnnnnnnnnnnnnnnnnnnnnnnnnnnnnnnnnnnnnnnnnnnnnnnnnnnnnnnnnnnnnnnnnnnnnnnnnnnnnnnnnnnnnnnnnnnnnnnnnnnnnnnnnnnnnnnnnnnnnnnnnnnnnnnnnnnnnnnnnnnnnnnnnnnnnnnnnnnnnnnnnnnnnnnnnnnnnnnnnnnnnnnnnnnnnnnnnnnnnnnnnnnnnnnnnnnnnnnnnnnnnnnnnnnnnnnnnnnnnnnnnnnnnnnnnnnnnnnnnnnnnnnnnnnnnnnnnnnnnnnnnnnnnnnnnnnnnnnnnnnnnnnnnnnnnnnnnnnnnnnnnnnnnnnnnnnnnnnnnnnnnnnnnnnnnnnnnnnnnnnnnnnnnnnnnnnnnnnnnnnnnnnnnnnnnnnnnnnnnnnnnnnnnnnnnnnnnnnnnnnnnnnnnnnnnnnnnnnnnnnnnnnnnnnnnnnnnnnnnnnnnnnnnnnnnnnnnnnnnnnnnnnnnnnnnnnnnnnnnnnnnnnnnnnnnnnnnnnnnnnnnnnnnnnnnnnnnnnnnnnnnnnnnnnnnnnnnnnnnnnnnnnnnnnnnnnnnnnnnnnnnnnnnnnnnnnnnnnnnnnnnnnnnnnnnnnnnnnnnnnnnnnnnnnnnnnnnnnnnnnnnnnnnnnnnnnnnnnnnnnnnnnnnnnnnnnnnnnnnnnnnnnnnnnnnnnnnnnnnnnnnnnnnnnnnnnnnnnnnnnnnnnnnnnnnnnnnnnnnnnnnnnnnnnnnnnnnnnnnnnnnnnnnnnnnnnnnnnnnnnnnnnnnnnnnnnnnnnnnnnnnnnnnnnnnnnnnnnnnnnnnnnnnnnnnnnnnnnnnnnnnnnnnnnnnnnnnnnnnnnnnnnnnnnnnnnnnnnnnnnnnnnnnnnnnnnnnnnnnnnnnnnnnnnnnnnnnnnnnnnnnnnnnnnnnnnnnnnnnnnnnnnnnnnnnnnnnnnnnnnnnnnnnnnnnnnnnnnnnnnnnnnnnnnnnnnnnnnnnnnnnnnnnnnnnnnnnnnnnnnnnnnnnnnnnnnnnnnnnnnnnnnnnnnnnnnnnnnnnnnnnnnnnnnnnnnnnnnnnnnnnnnnnnnnnnnnnnnnnnnnnnnnnnnnnnnnnnnnnnnnnnnnnnnnnnnnnnnnnnnnnnnnnnnnnnnnnnnnnnnnnnnnnnnnnnnnnnnnnnnnnnnnnnnnnnnnnnnnnnnnnnnnnnnnnnnnnnnnnnnnnnnnnnnnnnnnnnnnnnnnnnnnnnnnnnnnnnnnnnnnnnnnnnnnnnnnnnnnnnnnnnnnnnnnnnnnnnnnnnnnnnnnnnnnnnnnnnnnnnnnnnnnnnnnnnnnnnnnnnnnnnnnnnnnnnnnnnnnnnnnnnnnnnnnnnnnnnnnnnnnnnnnnnnnnnnnnnnnnnnnnnnnnnnnnnnnnnnnnnnnnnnnnnnnnnnnnnnnnnnnnnnnnnnnnnnnnnnnnnnnnnnnnnnnnnnnnnnnnnnnnnnnnnnnnnnnnnnnnnnnnnnnnnnnnnnnnnnnnnnnnnnnnnnnnnnnnnnnnnnnnnnnnnnnnnnnnnnnnnnnnnnnnnnnnnnnnnnnnnnnnnnnnnnnnnnnnnnnnnnnnnnnnnnnnnnnnnnnnnnnnnnnnnnnnnnnnnnnnnnnnnnnnnnnnnnnnnnnnnnnnnnnnnnnnnnnnnnnnnnnnnnnnnnnnnnnnnnnnnnnnnnnnnnnnnnnnnnnnnnnnnnnnnnnnnnnnnnnnnnnnnnnnnnnnnnnnnnnnnnnnnnnnnnnnnnnnnnnnnnnnnnnnnnnnnnnnnnnnnnnnnnnnnnnnnnnnnnnnnnnnnnnnnnnnnnnnnnnnnnnnnnnnnnnnnnnnnnnnnnnnnnnnnnnnnnnnnnnnnnnnnnnnnnnnnnnnnnnnnnnnnnnnnnnnnnnnnnnnnnnnnnnnnnnnnnnnnnnnnnnnnnnnnnnnnnnnnnnnnnnnnnnnnnnnnnnnnnnnnnnnnnnnnnnnnnnnnnnnnnnnnnnnnnnnnnnnnnnnnnnnnnnnnnnnnnnnnnnnnnnnnnnnnnnnnnnnnnnnnnnnnnnnnnnnnnnnnnnnnnnnnnnnnnnnnnnnnnnnnnnnnnnnnnnnnnnnnnnnnnnnnnnnnnnnnnnnnnnnnnnnnnnnnnnnnnnnnnnnnnnnnnnnnnnnnnnnnnnnnnnnnnnnnnnnnnnnnnnnnnnnnnnnnnnnnnnnnnnnnnnnnnnnnnnnnnnnnnnnnnnnnnnnnnnnnnnnnnnnnnnnnnnnnnnnnnnnnnnnnnnnnnnnnnnnnnnnnnnnnnnnnnnnnnnnnnnnnnnnnnnnnnnnnnnnnnnnnnnnnnnnnnnnnnnnnnnnnnnnnnnnnnnnnnnnnnnnnnnnnnnnnnnnnnnnnnnnnnnnnnnnnnnnnnnnnnnnnnnnnnnnnnnnnnnnnnnnnnnnnnnnnnnnnnnnnnnnnnnnnnnnnnnnnnnnnnnnnnnnnnnnnnnnnnnnnnnnnnnnnnnnnnnnnnnnnnnnnnnnnnnnnnnnnnnnnnnnnnnnnnnnnnnnnnnnnnnnnnnnnnnnnnnnnnnnnnnnnnnnnnnnnnnnnnnnnnnnnnnnnnnnnnnnnnnnnnnnnnnnnnnnnnnnnnnnnnnnnnnnnnnnnnnnnnnnnnnnnnnnnnnnnnnnnnnnnnnnnnnnnnnnnnnnnnnnnnnnnnnnnnnnnnnnnnnnnnnnnnnnnnnnnnnnnnnnnnnnnnnnnnnnnnnnnnnnnnnnnnnnnnnnnnnnnnnnnnnnnnnnnnnnnnnnnnnnnnnnnnnnnnnnnnnnnnnnnnnnnnnnnnnnnnnnnnnnnnnnnnnnnnnnnnnnnnnnnnnnnnnnnnnnnnnnnnnnnnnnnnnnnnnnnnnnnnnnnnnnnnnnnnnnnnnnnnnnnnnnnnnnnnnnnnnnnnnnnnnnnnnnnnnnnnnnnnnnnnnnnnnnnnnnnnnnnnnnnnnnnnnnnnnnnnnnnnnnnnnnnnnnnnnnnnnnnnnnnnnnnnnnnnnnnnnnnnnnnnnnnnnnnnnnnnnnnnnnnnnnnnnnnnnnnnnnnnnnnnnnnnnnnnnnnnnnnnnnnnnnnnnnnnnnnnnnnnnnnnnnnnnnnnnnnnnnnnnnnnnnnnnnnnnnnnnnnnnnnnnnnnnnnnnnnnnnnnnnnnnnnnnnnnnnnnnnnnnnnnnnnnnnnnnnnnnnnnnnnnnnnnnnnnnnnnnnnnnnnnnnnnnnnnnnnnnnnnnnnnnnnnnnnnnnnnnnnnnnnnnnnnnnnnnnnnnnnnnnnnnnnnnnnnnnnnnnnnnnnnnnnnnnnnnnnnnnnnnnnnnnnnnnnnnnnnnnnnnnnnnnnnnnnnnnnnnnnnnnnnnnnnnnnnnnnnnnnnnnnnnnnnnnnnnnnnnnnnnnnnnnnnnnnnnnnnnnnnnnnnnnnnnnnnnnnnnnnnnnnnnnnnnnnnnnnnnnnnnnnnnnnnnnnnnnnnnnnnnnnnnnnnnnnnnnnnnnnnnnnnnnnnnnnnnnnnnnnnnnnnnnnnnnnnnnnnnnnnnnnnnnnnnnnnnnnnnnnnnnnnnnnnnnnnnnnnnnnnnnnnnnnnnnnnnnnnnnnnnnnnnnnnnnnnnnnnnnnnnnnnnnnnnnnnnnnnnnnnnnnnnnnnnnnnnnnnnnnnnnnnnnnnnnnnnnnnnnnnnnnnnnnnnnnnnnnnnnnnnnnnnnnnnnnnnnnnnnnnnnnnnnnnnnnnnnnnnnnnnnnnnnnnnnnnnnnnnnnnnnnnnnnnnnnnnnnnnnnnnnnnnnnnnnnnnnnnnnnnnnnnnnnnnnnnnnnnnnnnnnnnnnnnnnnnnnnnnnnnnnnnnnnnnnnnnnnnnnnnnnnnnnnnnnnnnnnnnnnnataggtagtttgccgtgtaggggggggggggggggggggggggggtgcctgggtattaggaaattcgcctgatagagtggagtatgttccctagccaatcatacataataaacaccttatttctttcaccactttcattgaaaagataaatgaattaattggatttttattctttttgtagtcagatttctgtgacaatcaattgttttgcaaattttctcttgcccgttggttgaccttttaacttttagcagggtatcaatgattcggtcaactcctaaccgttatattttatcgtgtatcaacatgatgcccgacggttcaaggatttgctagtgctgaaagtttgctgtagtgacgttgcagacacgtaaaaggtatggcgggcaataagtcaataacgttaaaagtacggtcgtttcacgttgccgcacctatttgatgaccgcaaataacaccagtaattgttgcccttccatttatgcggggtctgccttcataagttcaacacacaaaggaccgattttcgtgtagtactttgaatatcgtggtcttttcgcgttccatgattgaagactccccttcatgtaataacatttatatttattgggcccctttccattagcggatctaagttttataagagtccctgctatctatattttctatataggcttctctactcctaaagtacctccagatatcaaggcaacgcgctcaatggccgctatcaaggctaccaggtcaaaggatgtcgtttcaaaaagaaagttgatgcggcaaaaacaatgccgtcgcaaaacaagtctgatgaaaaaggcatgcgaatatagcaggatgtgcggcgcagacgtatgcgtgggaattcgtatccgagagacgggccaggtacatattttatcagcggatacttcgggattttgggctttccttagctcgcaattagtatgtctcaaactatggctctgatgaaaaggtgactgacctatcaagaactcctactatccagcgccaatgctagtgacacaccaggatctaccgcaggttgataaagatacaccgcaacaacctatatgaagtcataagaccgaagcggaaccttcatcagaaagaacctttgtttttcccatcctcggtcagggattttatgcaaccactatcccaatagtttaatttactttactgagaatatagctgtgattggcggtccaatgatgaattctatatgaggtaattttccatgtgcagttccccatacggaagagggctctgtatggaagaaggctccgtatggaagaagactacacatggagactcactgattaccaacccaaacagggatggcaaatgcgagatatcattggctagcttgactactccttgaagcgccagactactcggtcttcctactccaaggtggagaaaggagtcctagagaacccttcttagacctccttatctccggctaacgccgaacgactttaatattattgcctccataattttcacctagattaattttagcctcatgaataattatgccagacctaatattatatctttgtaaatttaaagcactccaatatcattgccaccataattttagccttataaataattataacggggctaatattgtgtcatagtaaatttaaaactcgccaatttttaatatagctaagattaaagtaaatacatgcattcttgtaaagtaaattagaaatatgggacaaagataagaagtaattccatgaatttgtcactggctggtcttctttgcttgtattcatttgtctggaacggaacgcacctaagattccttgaaaaagcaaagggagccccaacagcagaccactagttagtagcagattcgagaaagcctcttttggcatttccaggtgacagatgcaaatggtattgctcttgtcgagcagctgcgcggacgataggatgaaatggcatgatgtgcttggtggctttgacggagacgcgccatgaaacgcgcggctctgtcgcagtatcgtcatgaaatatggcccaacgaaggcacacattggcgtaaccaccaggttcagatacctgcatttgattcagcgccccagtcacctgagaatagtctagccacagactctcggcgggacctgagataccgtgggtgacgttaaaatcctccgagaaacggatagtgccggcaaatatacccaggaagtctccctcgcagataggcacaatagaagagacgaatagagaatcgtcgtctttaggcagaagagtgatgaatgcggacttgtctgtcccaccttcgtataccgattcatcgttgtgtggtatgcctagaatatcagtcgagatagacactgagccgcattgcctgaagctttcttcttcggtgttgacggcccactcgttcgaagcattatcccaagagagctctggcactttcaaccgttctagcacctgaggattggtgaggtagctaagacgcttcgagtctcctgtcttcaatttggtaatccgcgtttccagttgttcgaaatgagggagatactcgttttcccatctcaaaactttatccacaagcggagtttccgatgttttggaataacctctgcagaaactgtcgaattctttcgtacggtagaagagaattttctcaataccagcctcacgcatgtggaatatgttcttccagaaaatgcggtattgtcgctggttttctgcacccaagctatacccggtgtcttccatgaatttctttgtggcagctttttccgccatggtgaatccatcagccgggcccttgacgggtggcagcgtggcagggtcgatcagcgccgcgcacttgagaatgattggccagaagatagtttcgttgtatcttgtctgtattgccctgccagtagttaaagcagtgtctcttcgaatagcgtgaattgcctgctcataactgtatccagagaactcttgggcgtgctcccgcatcctctcgagcttagttgttgccagggccatgcagtcgcgctgtccatattgtgcgatatcagagttgtatttgacacattgtatcaatattgttgttatgaccttcatctcgaaggctgagtttaggtgtaacggcaaagagctgtcaaggggatctggcacagattcggggtcgtcgacttcggactaaacatgacccatgtatctattagactttcttcaatctagatgaacaaaataacataccgttgtttgtacttctggcgaaattgattcctcgggtgccttatctttggctgtcccatttccatcagctactgacgaaccgggcggttgatctatcaactccgaccggtggcttctttttctcctctttttcttcttcttctccgtgctggccatatcgctataggttgtaggaccctccttccctgtccgtttcataagtcgataggacccacgagtgtcatgtggtggagtcggaggggtttctatggtcgcttccttagcctgagaaataggctcggtcgcgcccctagcaatcacgagtcgagctttgtaaactaaagcgaccgttaatgatccattctctcagacgttggcgggggctaactcaccatgatcggcagcgtgggcgataaccagattaaggtgctcctcactgtcctcaattccgcaaattgtgaatacctctcgtatcttctgggctgtcaggcccacaatgnnnnnnnnnnnnnnnnnnnnnnnnnnnnnnnnnnnnnnnnnnnnnnnnnnnnnnnnnnnnnnnnnnnnnnnnnnnnnnnnnnnnnnnnnnnnnnnnnnnnnnnnnnnnnnnnnnnnnnnnnnnnnnnnnnnnnnnnnnnnnnnnnnnnnnnnnnnnnnnnnnnnnnnnnnnnnnnnnnnnnnnnnnnnnnnnnnnnnnnnnnnnnnnnnnnnnnnnnnnnnnnnnnnnnnnnnnnnnnnnnnnnnnnnnnnnnnnnnnnnnnnnnnnnnnnnnnnnnnnnnnnnnnnnnnnnnnnnnnnnnnnnnnnnnnnnnnnnnnnnnnnnnnnnnnnnnnnnnnnnnnnnnnnnnnnnnnnnnnnnnnnnnnnnnnnnnnnnnnnnnnnnnnnnnnnnnnnnnnnnnnnnnnnnnnnnnnnnnnnnnnnnnnnnnnnnnnnnnnnnnnnnnnnnnnnnnnnnnnnnnnnnnnnnnnnnnnnnnnnnnnnnnnnnnnnnnnnnnnnnnnnnnnnnnnnnnnnnnnnnnnnnnnnnnnnnnnnnnnnnnnnnnnnnnnnnnnnnnnnnnnnnnnnnnnnnnnnnnnnnnnnnnnnnnnnnnnnnnnnnnnnnnnnnnnnnnnnnnnnnnnnnnnnnnnnnnnnnnnnnnnnnnnnnnnnnnnnnnnnnnnnnnnnnnnnnnnnnnnnnnnnnnnnnnnnnnnnnnnnnnnnnnnnnnnnnnnnnnnnnnnnnnnnnnnnnnnnnnnnnnnnnnnnnnnnnnnnnnnnnnnnnnnnnnnnnnnnnnnnnnnnnnnnnnnnnnnnnnnnnnnnnnnnnnnnnnnnnnnnnnnnnnnnnnnnnnnnnnnnnnnnnnnnnnnnnnnnnnnnnnnnnnnnnnnnnnnnnnnnnnnnnnnnnnnnnnnnnnnnnnnnnnnnnnnnnnnnnnnnnnnnnnnnnnnnnnnnnnnnnnnnnnnnnnnnnnnnnnnnnnnnnnnnnnnnnnnnnnnnnnnnnnnnnnnnnnnnnnnnnnnnnnnnnnnnnnnnnnnnnnnnnnnnnnnnnnnnnnnnnnnnnnnnnnnnnnnnnnnnnnnnnnnnnnnnnnnnnnnnnnnnnnnnnnnnnnnnnnnnnnnnnnnnnnnnnnnnnnnnnnnnnnnnnnnnnnnnnnnnnnnnnnnnnnnnnnnnnnnnnnnnnnnnnnnnnnnnnnnnnnnnnnnnnnnnnnnnnnnnnnnnnnnnnnnnnnnnnnnnnnnnnnnnnnnnnnnnnnnnnnnnnnnnnnnnnnnnnnnnnnnnnnnnnnnnnnnnnnnnnnnnnnnnnnnnnnnnnnnnnnnnnnnnnnnnnnnnnnnnnnnnnnnnnnnnnnnnnnnnnnnnnnnnnnnnnnnnnnnnnnnnnnnnnnnnnnnnnnnnnnnnnnnnnnnnnnnnnnnnnnnnnnnnnnnnnnnnnnnnnnnnnnnnnnnnnnnnnnnnnnnnnnnnnnnnnnnnnnnnnnnnnnnnnnnnnnnnnnnnnnnnnnnnnnnnnnnnnnnnnnnnnnnnnnnnnnnnnnnnnnnnnnnnnnnnnnnnnnnnnnnnnnnnnnnnnnnnnnnnnnnnnnnnnnnnnnnnnnnnnnnnnnnnnnnnnnnnnnnnnnnnnnnnnnnnnnnnnnnnnnnnnnnnnnnnnnnnnnnnnnnnnnnnnnnnnnnnnnnnnnnnnnnnnnnnnnnnnnnnnnnnnnnnnnnnnnnnnnnnnnnnnnnnnnnnnnnnnnnnnnnnnnnnnnnnnnnnnnnnnnnnnnnnnnnnnnnnnnnnnnnnnnnnnnnnnnnnnnnnnnnnnnnnnnnnnnnnnnnnnnnnnnnnnnnnnnnnnnnnnnnnnnnnnnnnnnnnnnnnnnnnnnnnnnnnnnnnnnnnnnnnnnnnnnnnnnnnnnnnnnnnnnnnnnnnnnnnnnnnnnnnnnnnnnnnnnnnnnnnnnnnnnnnnnnnnnnnnnnnnnnnnnnnnnnnnnnnnnnnnnnnnnnnnnnnnnnnnnnnnnnnnnnnnnnnnnnnnnnnnnnnnnnnnnnnnnnnnnnnnnnnnnnnnnnnnnnnnnnnnnnnnnnnnnnnnnnnnnnnnnnnnnnnnnnnnnnnnnnnnnnnnnnnnnnnnnnnnnnnnnnnnnnnnnnnnnnnnnnnnnnnnnnnnnnnnnnnnnnnnnnnnnnnnnnnnnnnnnnnnnnnnnnnnnnnnnnnnnnnnnnnnnnnnnnnnnnnnnnnnnnnnnnnnnnnnnnnnnnnnnnnnnnnnnnnnnnnnnnnnnnnnnnnnnnnnnnnnnnnnnnnnnnnnnnnnnnnnnnnnnnnnnnnnnnnnnnnnnnnnnnnnnnnnnnnnnnnnnnnnnnnnnnnnnnnnnnnnnnnnnnnnnnnnnnnnnnnnnnnnnnnnnnnnnnnnnnnnnnnnnnnnnnnnnnnnnnnnnnnnnnnnnnnnnnnnnnnnnnnnnnnnnnnnnnnnnnnnnnnnnnnnnnnnnnnnnnnnnnnnnnnnnnnnnnnnnnnnnnnnnnnnnnnnnnnnnnnnnnnnnnnnnnnnnnnnnnnnnnnnnnnnnnnnnnnnnnnnnnnnnnnnnnnnnnnnnnnnnnnnnnnnnnnnnnnnnnnnnnnnnnnnnnnnnnnnnnnnnnnnnnnnnnnnnnnnnnnnnnnnnnnnnnnnnnnnnnnnnnnnnnnnnnnnnnnnnnnnnnnnnnnnnnnnnnnnnnnnnnnnnnnnnnnnnnnnnnnnnnnnnnnnnnnnnnnnnnnnnnnnnnnnnnnnnnnnnnnnnnnnnnnnnnnnnnnnnnnnnnnnnnnnnnnnnnnnnnnnnnnnnnnnnnnnnnnnnnnnnnnnnnnnnnnnnnnnnnnnnnnnnnnnnnnnnnnnnnnnnnnnnnnnnnnnnnnnnnnnnnnnnnnnnnnnnnnnnnnnnnnnnnnnnnnnnnnnnnnnnnnnnnnnnnnnnnnnnnnnnnnnnnnnnnnnnnnnnnnnnnnnnnnnnnnnnnnnnnnnnnnnnnnnnnnnnnnnnnnnnnnnnnnnnnnnnnnnnnnnnnnnnnnnnnnnnnnnnnnnnnnnnnnnnnnnnnnnnnnnnnnnnnnnnnnnnnnnnnnnnnnnnnnnnnnnnnnnnnnnnnnnnnnnnnnnnnnnnnnnnnnnnnnnnnnnnnnnnnnnnnnnnnnnnnnnnnnnnnnnnnnnnnnnnnnnnnnnnnnnnnnnnnnnnnnnnnnnnnnnnnnnnnnnnnnnnnnnnnnnnnnnnnnnnnnnnnnnnnnnnnnnnnnnnnnnnnnnnnnnnngggtcggtcgcgcccctagcaatcacgagtcgagctttgtaaactaaagcgaccgttaatgatccattctctcagacgttggcgggggctaactcaccatgatcggcagcgtgggcgataaccagattaaggtgctcctcactgtcctcaattccacaaattgtgaatagctctcgtatcttctgggctgtcagacccaaaatggccttatccatggcgggcgatgatgatggcaaaagacaaagactgcgtcttttgtcaatgaagacagaaatccttctggaacgttcggggcaacggttgccctctggttggggggagggaagaatgagccaattaaatcaaacacaggcgaggctcacaaaaatagtatcaaccaggctaaggcaagacttgaccgggattgaccccctctttttgttgtgtttgtgtcggccatttgcatatcaaagagcaaacaaatcaaaccatactattatataaatagttctttccgtaaccttcaccatcaggataggtgtaacgcctatctggtatatgccttgcgcgcaaggacaggacagagctttagggaatattggtatctgcgcctgaattttcgaatcatatcctcaggcgtctctccgtatagtttattccaaaaatgggactgttctcgatgcgccaaaacactgaccgcaggaatgaatgtgaagccgatgcatggctgcacgatattccaggctgagcaatatcccaaatcatgtgcgatgtcggtcggatgtggtgaggagtcgatttttcgtagaaatcgaggctcgactcaagacgttgaggtgaacatttcgggtgttcaggacacgggtgagcgtccatgaatatgagtaactcagatgatttcgtgattgactccgagtcaactgttgaacagttgaaccggaaatggtaaaggttggttatgttggtcatttaaaagtggtgatgaaaagcaataaacggatggcaggtgagagacgcggcctcctggacaagagtacggtggtcaattactgccaattactgccattggccgaatacacccacgcttcctgggccccgcacactatcacgtgtatctcctaaaccttgagtcgcgctccaagttaactgcgtgaaatcgtttaggcctctgtggtcggtcgatcttatgccacgtattcaatgacagctatttagttaactaaaaaaaagatgctttccacgataactgcaccgcagaataaatgagggtagaataatagcgtgcaaggagctgtaaacgagtgttaaaggccaatcaatgctggtgaaaggataaaggtcaacgggcaagagtaggtttacagctggtgattaaccaattgaattgattgtccctcggcaatctgactacgaaatggtcgaaaagaataacaaaccgattaattcatttttttttaaaaaaaacgcagtgaaagaaatagggtgtttattgagtatgattggctacgggaaactccccactattaattatcctttggcatgcccatttttccgccatattctccaggcctcaagtaccgttcctgttctaactagttagtacctgactagttattttggggaaaataaaataaaaaaaggctcttaaggcgagaacctcaggctagctacgctatacagttgaccgaattttccaaagcagacattcattgtttacttttggccctcaaaatcagaaattccttattattaacggacctcgacgtgatacattctacatttacgttcatcacctactagagtgaccgtttcggatttttgctggtcataaactcggaaacccgcagtttctggagcgcactcctcgattgcctctagccgtggttttcaacgtaaattcggcccgctataaatctattacctgcggggggaccgtttcaggtatttgttggccatgaactctgaagaccacggtttctagatcgcaccactccttttcaacgcgaaaacccacgaatataaagaggaccgttttgtacgtgtttgtagccttaagaatccctaagagccacttcgtctatacctacgactatttaggttgccgtttccttcagtcttctctaacagtgacgcgtctctttatatagcttccgcttcttccgcctagtgcaatcgatctaaatcggtcagaaagtctaagcgccaaaaataaggccgtcgaaaatcaagccttataaaaaaggtggccgaatatagtaaggtgtgcgatgctgacgtctgtgttggcatacgccttcgggaaaccggccaagtctttctcttattagcggatgcttcgggattttaggctttctttggctcgcaattagtatatttctatatctctgatgaaaagtcgactaacctatcaagaactcctactaaccagccccaaaactagtaaccgaccaggatctaaatcttattgataaagatacgccggaataatatacataaagtcgtaacatgaaagcggtacttccaccatactaaaacctttataattaatgatttgtttgctttcatcttagtcagcgacttgaaacaaccattagtggtctttcttaatagttcaaggtagtgagcgtacatcaagaggagcagagctgatctgtggcctagcccaaacgggcctagtgaggggtacaagtatcttggcggtggggcgagagacaatttctctgtgtaacacatggaagccaatttcgaatattgctgtaaagcacgatgagctgtggttccgaagtggattgatcttccatacgcatgggttctcaatacgcccgaggatcacgggaatctaaatggcccaagttatatggtcggtttatcgcttgtgtaattcaccgccgtagcaacaagtcgatttctatatgtatgattaggcctattgatggattgatgggaagttctcatgaagattgaagttcagctcgcgccccagccccagcttgttggtctcaccgatcctgttcttgtagaagttcaagcttcgctccatgatcaccgtcaagtctccgaggatttcggaggattgccaactttacctcgtccccttcctgggtcaagcacaggtatgcggcagctctgcggttatcttattacgttgactgatatttcccagacaacccgattgacgttgatgctctcagtgacccagatatcgaaactcgcgtctatcctcatgacttgccccgcgccggcgacagtattggtttgttgaggtacttctcctgccggagacaatgaactgatcagcagctaaagaacccgatcgatcttgatgcggactctgtggcagtgagcgatacaactaaaccccttcccagcttaccagcaagcccggccccagttgaacttagaccagatggtgaggaacgacttgaacaagcctcagcggcaaatcaagcctattttatatcgacctcttatccttgcaatgatgaaaagtagtccttcacctctcttcacacactcagtctacttcgcaataagaatgaacactcttctaaggcttgcacctaccatgcgggcaggggccttgaccatcacaagtctcagccggaagcaagtcaaagattttgcacaaaattccactagaaaggcccatcccatacattcaaggctcacgactgctggccacaagtgttcggtcttgaaatcacgggcacagtcttatcatcgggaaggaggttcctttcaaccaacccagttaggtgaacttcgcttcttccagataccgttgccatcgtccaaggagaacttttaaccttccctcggggatgatgctgagcggcctggggtggtgccacccaacgctagactgctcttacgaagactgatttcagaggctgattccagactgccaaacagggggaccctcactgctctcggagaacttctttgtctagacacattccacttccgaggatagctcccataacaggcagttgaggcctacattctaagttatcatatcaatcacgaatccttcagcctccgcaatgcgtggggaacatgatagtagagtttctagagtgagaggtctaccatagatgtacgttgtaaaacagcctactagaaaactctagaaatagtacaatacaactgtcaattgaacagacttgctcctcatactgaacacagttctttcctgaccgcaacaaaccactactgcttacccacacatacatagtagccaagccacaaattcttgcagccatctcccacatagggattccacgcgaggaagtcggcctgtgagatcccgtactgcgttgcgatacttgcacatatgtctccatcctcaaccttgtgaaactgaatacagccatcgaccatcttcggcaaggtgggcgttggcgtcgcctcagaggtcggtgaagggctcagtgtggtggtagggctggggttagagcttgggctagcctccacacagacataattgtcaagccacagatttgtacaattagttcccacatctgggttccacgtcaggaaatcagctcgtgagatcccatattccctcgagatcgttgcgcagttgtcaccgtcaaccaccatatggaatttggtgcagccttttgtcatatttggctgggttggggttggagtgaccacgcctggactggtggatgtgggtggaggggtaccactagtagacgtcggtgtcgagcccacgcagacataattgtcaagccacagatttttacaatcggctcccacgtctgggttccatgtcaggaaatcagcttgtgagatcccgtattccttcgagatcgttgcgcagttgtcaccgtcaaccaccttatggaacttggtgcagtcttttgtcatgtttggctgcgtgggcgttggagtggcgatgccagaagtggtggttgttgctggagagctatctgttgtgctggcactgctcgaggtaggcgtgcagcttgtgggaatggcgctcggggatggggacggaactgggtctgtagggcccaaatcacaataactttcgtaaagcgaatagcagttatccgatagatcatcctctgggataaagccgttattctcatcttcggcggtaatccagcagtacttggttcgttcagcgagaaggcttgagagtgtggcgtttggcgtgaatgtgggaatggaaggcgtgtagtttggatcaatgataggcgaataccatgaagtggtgatattatccattgtggttaccggagttcctggtacccatgaggtaattaaagaagacggaagcccggcggatgttttatttgtgctgtcggggaggctgaactctcctcctcctgggggcctatttcaattagaatagctccatgccattgggacacgacttacgatatgcaaatacttcttcccaccatcgaatcaagattatcgcagttttggtgtattgttctgaatgcttggtgagtccgctgtcaaaaagtcaagtcgaaggtaggctaacgtacggattccatcctatcagttgcaccaatccaaatgactgggctttgataatatcattgcatgtttgattctgctgcactgtaaacacagtacaggtgtcttggatgcaaagcggcgtcccagaaatgagcattgagcatgaatagtcaagtttattcaccttgataagctgatcggtactgacagagttagctttagaaattgacttgcaagtatccccttcgatcgatatataggtgtggccagtacaagtcggtgtggcggtggtcgatgttgcgcctgttggcgtggataccatcgtggtcgccgttggcaaaggcgtgtaggtatacggatagctcgaggctggaacgctgcaagacgaaagcaatgacgagaaggcggctggcgggaacttgttacgtccgtaatcagagctcatcatgatcgagccgtacttcagggtgcaatcagaacacggggccttggttcgattatagagatcagccaaacagtacccagacctggacttggtcagtgtctattccagggcctatacggcctttccgcaggagatacacacgcgtcttggatacacatcaggctatacgcccacaccaacccatcagctaccaccgcgggcgattgcgttgtcgtgctattcttgtataactggtactccttctttccgcaggccgaaaggatgctctcctggaaggtctggagggaatcgtgacattctttcgtgcaatatgtcttggcagccaccccaaccagtgcggccccattcgcagcatcctgtgcagtaacaaggctgttcgcgcaagtcatattgtaagttagggcatttcgacaatcagaggggaccgcggtagggatgtcatctagactgtcccagacctggatcgcagcaacattttgcccaaaaaagggcaaaacgaaggcaataccgacactggtgagaagcattgcgttcaatgtcaacaagtcaaaaaattttaatggtttctaaagtcagaattcgggaaaagcctccataactgtgtctcgcgggagctcggaagttattcctcttccgaaaaaactataataaccgatggatggtcttataacactaagacagcgctagagtaaggtacttacataaattagtaggatgcacgaaatttggcccccatcaaaccctctcggataacggattggggcttggttagcttaattgcactactgcacaagtaagacatcttaggacccacttaacccacaaacggagattaaatgaagcttcttaggggcagcaggatcccaaccctcgaggttttctttcttggcagcgcactaagaggtgtgatttagcagtagttcaattcttccacggctatacggcactgaagttggggtttctcattcagttagaaacggagaattcagctaaagcagccaatctattattttagagctaagaggatgggcaagtcgttgatattccaaatttactctaggaaaaatccccctccttcgttcactccttttcttgctttcttttgtcctgtcactctctacttataaaatatttccgacagtgttgagttatccatacccgactcgcttcacccgtacatgggatcatggagagacccttccatttgctctggaagatgaactctcttacctggccattgctgtttatctgtttgatattgcttcagcttccctcggctattgcccagggacctggtgagccgggaggcacttgcacagattcaattccatgttaccaaggctgctgtagcaaagactatgcatgtggttttaccgacgctcattgcgggactggttgcaggagtaactgcaatgcgacggcagagtgcggagagttcgctgctccaggtaattctgactgtcctattaatgtctgttgcaggtaagttagcggtccgacccagggggttttcgttctaacgactaacggttggcagttcattcggatactgcggtgtcacttctgaattctgcggcaacggttgccaaaaaaactccaatggtgggggttgcggcgaaccagagtatgtctgcttcggccgctcatgtggaatataagtactaaaaccattcagtcgcccgaaatgctccgagaatactgatgccatgtcctatgatcgacgtattggatattatgagttgttcaacatccataaaggatgcaatgtgattgagccagagagtctgatcattgagccgtttactcatatcaacctggcctttgtcaactttggtgacgatttcaagttggaagacgagtacggcgacgttgtggaccgggtgtcgttcttgaagtttacccacccagggctgcgggtcaacatcgcggttggggggtggacctttagtgatgctccgacgcagcacctttggactcagagtaagtgactcaattggcaatttgaatccatgcgcacactgacgctggacgcagtgacacgctcatacgagaatcgtcagaccttcatcaactcagtggtcaaatacctgaaggattaccaccttgacggtattgacattgactgggagtatccgtccgcatcggatcggggcggagaacctcaagacgcggcgaattttgtgacccttttgggtgagctgcgggaggccttcgatcgcgagaatcctggctgggagatctcggcgacactcccaacgagctactggtacttacgcggatttgaccctgctggcatggctaaatatgtcgactacttcaatctcatgagctacgacctgcacggaatgtgggaccaagacatcacatggactggtccttacctcaaaggccatacaaacatcactgagatcgacctcggtcttgaccttctttggcgcaacggcattgacccatccaaggttgtctttggctttgcattctatggtcgctcctttaccatggcagaccccaattgctatcaacccaatggcaaatgcgaattctcggacggtggaatacctggatcatgctctgacacctcgggcatcctgacatacgccgaagtcacgtcaaggaacaactcccttgatgtccatacgttctatgatccggagacaacggtcaaatataatgtttacgaggggacccagtggatctcctatgacgatgagcaatcatttttcgacaaaaagaagttcatctccagccgatgcctgagcgggtggatgatctgggcaatcgaccaggatgatggcgattttgacgcacttgccggagttattggcgaggacctctcagtcatgcagatggagggtggtggcttatccggggatgctgccaacgtcctggccgacgcctttgccgcctatactggccaaaactgcttcgtcacaccgcgctgcactgacggctccagtggggagaagaaccccgaccaggtgtgcccatcaggatacatgtcggtcagcactgcacacaatcccctgcaggcgggcaataaggagctccgtggcgactgctctgagggatggtatcggcacatctgctgtcccgaggatgccatgcccaagaactgcgaatggaacggggcgcccgagcgaagcgagttcggctgcgacggcaaatgcgggagcaaccagttcaaactgaatcaagacaccgcgctggacgccaaaggtgaagggcaatgctttattggcgaacgctacctatgctgcgattccgcagccatgttctccgattgcaggtggaccaattgccaagggccgctgatgccttccaccccaggcgaatgcccggcagacaatgatgccctgacattccgctgggataagccggatggcaagccgtggtgctccgatacttacgtatcgtctgtcgacggctctgttggtagcccgctgcacgaccgcttcaaaagcgagctctgctgtccatcagatcacagttttagcgtcagtggttgcgcatggaccaacaccctttcccaggctgacatgacagacgacgactgggcggaacatctcacggatctcgtctgtaaaccgcgtccctgctcacctggaaaggtaaaggtagctggtgcgctcgatccgccaccggcgacgggcgcaggatccaagtcggagattaactgcgctggagtcactatcccgcctggcagtaatcctgaatggtcgttctgttgtgatccaccgagtcgatacgacaagaactggcccgttgatcccaagtacctatgggaaaaatactataacgaccctaagaagtcggatgtcgtttgggaatacagcgatgagtaccagaacaacaacatggatagcgagccctctacggaggaggatggcagcgacgcctatggatttgtgatgctcgacggacccgatggatccatcgacaacgacttcgcgacgtcgcataccgttgtacgtcgttcccgggaaatcccccgagtcaaacgttccgttttaacaacgaaccaaactctcatggataccgtcttcgaccacgcggaggagacattccatttttactgcgactatcccgcaggatcccacgaatgcgagcgtgtcttcatcgatggcgccgaggacacaatcatccggcttccagaccatgtcggcgacggcccgtttgcccgaattgtctccatgaaaacagcccacgacgagtatcaacttccggatcatcatttggaacatcggtcgctcgagcgcaacacgaaccccgtctatgaggtgaagatagactataatttccatctgattaagctcaagcgagatgatgagcccgtgaacattcgcgtggactatacgaatctgatgggatactgggatgaaatgaccaactcgccagctagccgcgcgaaacgtggccttggagaagagggcctcaccaaggatgagtggcgctcccgagttcaacgggccgttgtacgccacggtaatatcgagaagcgtagtgaggctattcatgtgaaaacaccaatggagttctccggctcccacctcgacaagcggtggtggggtgcgttcaaagcctggctacagaaactggcatgtattcccctggtgactgcgtactctttgctccaaatacatactaacgtccatgccagactaaggtaaccaaatccagtttgggcgtgatcgaactgggattctccaagaccatcaacttgttccgggcgcaatggggatgtcccggccagacattctcagctaacctccggatggatttggaagctgacctcgtgatggatgccacttatgcctactatttatccgccaccttcatcccccccggcaagcccgaaacgtttgcttacttcggaatgaatccaactgcttatctcggactccacatcgagggaaatgcgcagatgcagacaacaaccgaccgcaagaagatcattgacaccctttcctatcctggactggccgtgaagggaattgcggcagtcggaccaacactagacatttatggcgaagtaagactttaaaacctcccagtagatatgcatataaactgacatcgatccagatccgaggcaaggtaactttgcatggcgaggcgactgccggagcacaactgtccttcgggaaggcggaggtttactggccgcagaatgatgatgcaaaggataagtatgagacactgctagggctccaaagtgacgtacaggcgcccgctcctggttctgttgagccagtctttgaagcaggtgtggctctggacgcgcaactcgacattatcgtaacaccggaggcacatgttggtatcaaaatcggcggcgggaaactcgtcggcggtgctaccctaatggacgcgcagttaaccggctacgtaatgggcgacttatccttccaggctcacggtgattatgacacgactggtaacgagttcaactacagcttcggagcgtacctcttctacaatctcgggtacaaggccacggcccaaattctcaacttcatcgattgggcactagcgcctcgactggcatacgacccgcgtaagacgttcaagctgtacgagaagaagggttcaatcccaatgtcgtcatcagctaaatcaaagcgcgaggccgccatcgatggccctttgcaccggaatcttgtcgaggtcggctcgttgaccaacggctctatctctacataccttgattccgcctcgggtttgtccaaacgtggtgatgaaatggatatcggtacgtgaaaagtcgccctcttaagtggcttccaaaagtgtcccagcgctttgagttactgatgattccagatggccccaatgctccagagtttacgcagaacctcaagtgccccccgggcaccagtggagacgttcggctgcccgaaattcgatgtaagccaacccagcctcaaccaaccctccctaaacaaaaagtccatcattctttccgattatcgttgctgactgaggacagttaactgtgacttcctcaacgactttattgaagaaggcaaaaatggcaaaatggatgctattaccggtctctgtacgcccgtgctgaacatccctgacaataaacgccagaagctattcaccttctcgaatgacaaattaaggaaggaggcacgatataacgcacaatgtaaatcagggacctgcacgcaggcaactactgacttgcgagaccaccaggggaataagaagctggagctgcagtgcgacgagttcccctggaaatcttccgagcaaggcggcgactatctcgctagtgacgctcgcacaggtacctgcgtggcatcttaccagaataactggcatgggcaatgtcttcgtaagtcacgtcatggtctgttggtcacctttgtaggactttgctgattggttcctatagggatgataggatacatgcaatcaaactgggccaagcttgagcctgagagggaagacggagacaaccgcggcgacttctggcaggattggagagaggattgtatgacactatctttcactcagtcttcttttaaaaagatactaatgccaacccgcagcatggacaaaacctgggcagcacggatctaaaggttcgcaatacgagcagagactgaaggaataccccgaaaagcagcccctgcctgacggagtcaccacgcgagtaagtgtcaccaactcatatccagagaggtaaacaacatttctgactttaattagaacaacgataaaatatcctgggtgtttaaacgggactacgaagtatccttcatccgtcaagacccaagcactatcgatggtagtacgtggtggggagcgacgagtcacaagttccaaaagacgacccacagtggcccatcagggatggatgccatcttttgcgcgattaaccattttggccaggataacgtatataagttgccaaacggctataatggcctttgccgaaggaacaacggtagccccctcacaggttggaatgtcggcttcaacatggctaggtgcgaggtgaagtttgcgaaccccagtagtagtaacaagcgaagtatcggcacctttgctgggtgggaagtggaaagtgtgcgaatgctggatgaggacgaccatgaataggaggacaaaatagtgctagtagtatagaaatgtattctgatcctttgttttgattgccgctatgaaccgcgagactaaacgtaagattcaaagtgttgtatagtctatggtattaagcaggggaatctctgaatcgtataggatattgtaccgtcaacaattgtaggaattaacaaggtggtggtttttatttatatgtgcttcacgggcggactttgatgactaatcagttctgatatcactacatgcaaacagtgcaaaatagtgtttaacgtgtcattttccccgtgctggacaggcagggcctttccatctaccgtccagagctctgttttgttgcccatgacagtaatggacaaggcataccttccgcaatggggccagttacccgtcgagcattacttgatcgtgagtgtcttgcgccaatgttgttgtttcccctgcgtggctaatatctataaagaaacaatgggatcactcctcatctgagcctactggagaccagcgcctccgactgatccatcagttcttagatctagatgagattccgcaggaactggaccctactggtcatacctcggacacttacgaaacactgtcacctacggcctatgagattgacactatccttcgcccctggcgctctgatgacctacggaagatagcgtggaggatttgggggtgtcataatgatcagttgattttgttacgcacccactacaatgccgatgacaaccacaagatcacggaattagtagggtccgatgagctccacgaggagaggacagcctggtgggcacttcttgataatcccgaactcttcaattttggtgaccagtggtggcgagtcttcgatatcttgccagagttagccggccctttgaatggttatagccgcctgccagacccagaaagtatctcacgggagagacaggattttaaggagagactaccgaccctcaaacaaagcgacgaatggacggcgaatcgtgataattatattgaaagagagtttgcataccttcggcgaatagcttcagagggctatcttgctattgcagatcaggaagcttttgaaacagatatgctacggttaatctattatgatgggaagaggaatattgtccaagagacccggacagaattcgatgagcagacatttgctgatgttgccgttgaatgggaccagttgtcgcttcctatgcaattatgggaggacggaaagactggtgagaagtatcgagtgaatggggagctgggaagggagttatatcagctagatgaggctgatctggaataagcatggccatgtcgaatctggtggaatcgtggcacatgatatcgttcgtttgctcgttggcgtcatgtatttaggcgccgcctcttcaacagagggactcttcatcatctttatcgtcaattcaatcgtttatcgtcgttccaactgcttaaacatgtgagcgttactagcgccaatatgatagcaggttggaatcaacgtacagattctcccggaccccggctaggatgcgtattgacgggtcataatacatctggtaaatgcgtgcataagaaccaaccgggtacaccacaacacttttgacagccctcatgatgcagcttcctgtatgcccgaggtgattcttgggtagtgagctctcattggcttgcctgtgccccgatcttaccctctcggtttgaccaatgtcaaattgtaggctaagaatgagaagactttccgtctccttccccttgcaggtggacttgtgctaacagcctgattgtctgcagaggtacgctcatctgccaggaagcaagacaaaacatcagcattcctgcgcctttttccacttctggaaagacatcaaatgtcatccgcagacaacgaggatcacgcattcgataccagcagcctacgccacttgaaggtatttgaaaggttgcatgcttagccacaggtatgattcgggtagtggtataggctggtcggagttcaggagttgtatcatgtagacaaatcgaacaatgacctgatacacagaatctagggagaaagaggccgaggtacgcgatacgaatattctggtgactcatcgtcgatagtagtcatgcggaagggacagagagcatgcgacagtatttgtataggggagctcgagcagacaagacatttgttcgcgtggcattcgactcgagtgatagaaatgagggtgtcctgttatacgatccgagtcagcaaggattgatctagttggacgagttgtcgtagcgtacctgttcatggaaatccccaagtacgctcgagacgggacaatcagtttgcgcaatgattatatcggcttcacaactagatcacttacaactttctgcaatgcagttaccagccatgccacgtcgtattcaagctcatcgtaatctgcactcgcttcaaaaaagccgcgttggggtgcacaagacaatttgttgagacagtaaacgcgcgttacgaacccacttgcgataaacattgcacttccatggtggatgaatgtgtcgcgatgccagaggtccagggactccatagctgtatgaaggtggtgggacgagggcggaagacgcgatgaagcacgctcgtcggccgctaccttggtcttatcttcgatctggcggaataggccactcgcacagtatattttaccgtcgatgatggggtggccctataatagcgtgaagatgtcagcggtgttcgtggttagaggaataatgcttggcgcggatggtcagacacagcgcagctgtaggcgttagatctcacttaccttagcatggaaatgggagtctcaaggttctatgcaacgaagttcgcacatggatggccgcaccctgttgttgactcgctaccttggtttgcgatcttctacctaggacatgctgcattgttcgaagcgacggggctaggaatagtgtgtaagccatggctttgcgtggagcactgacggtagtgcaaggttatcagggccactctggtgagctcccaaaggttcactgtcaattatcagccagtagatcagcgtgggatcccataactcacatgttctgatagtcaacaccaggatgaagagaccacaagaagctgtggcccttgcactggcgtatggtcgaatgtccatggatctggttgtcccgcgtctttcaagtcagtacagtttcaaacaggatttccagacctctacatatctacagcataaaccctaagccgaaaacttgggttttcacatacctaaagtatgagcagttgtgcttcaaatttgaagtccatccagaggcgtgacagtagatcaactcagtcggctgctatagcagagacgacttcgcatagacactttgaccagctaacccaaatctaatatatttgattgactggcgtgaatgggacagtgaagctgcttggaatcacatctcttacaggcactgtctgatttgctggtccacaatgtatactataaatgtcagtacggtataaattccagtattccatcaaaagggagaacttatcgagcgcgtcagacacaagcctctcgacgttgcaaaaccaggtgaataatcgtagagtaaattgccggggatagaggacgtatttgtaggcttctcggtttctgtcaaccaccaacttgataggaggcgttgaaggacacatttcttgattgaggcctgttgagacccacgtgttgaatttgcagcaactatttgcagcgacatatttgatggttttacgtgcatatctttggttttcgtgttctacgtttttcttcattattatttttcctctttttctattgtccgcactatgttgccttctgcagaaagcgaccatgaatttgctagagctcaactgtctgtcgtattggatctctgccttcctagagtcaccacatcaagctatactagtttgataacagctttagttggcaggacgcatgaaaggaaaaaggaaatgcttaccaagaccatgccgaaataggaaccttctcacttaaggccaaataccagtcatcttcacgtacttagacactagtttttcaccttagggtcaacacgcggttacgtttcactgcctattgacatctctaccgcgatgtgtcttcctcaattgtggaaattggtacagacgtcggtggaagctacagtatgttccgaaactccaatggctatacagtgcgccccgaaactgatgcaaccacctaccctcttcgattgattctcgaggctccaacgccaaaacgcgctctatattgggggttcttccggagtacccctgtcagtaggatgtgtaagttattannnnnnnnnnnnnnnnnnnnnnnnnnnnnnnnnnnnnnnnnnnnnnnnnnnnnnnnnnnnnnnnnnnnnnnnnnnnnnnnnnnnnnnnnnnnnnnnnnnnnnnnnnnnnnnnnnnnnnnnnnnnnnnnnnnnnnnnnnnnnnnnnnnnnnnnnnnnnnnnnnnnnnnnnnnnnnnnnnnnnnnnnnnnnnnnnnnnnnnnnnnnnnnnnnnnnnnnnnnnnnnnnnnnnnnnnnnnnnnnnnnnnnnnnnnnnnnnnnnnnnnnnnnnnnnnnnnnnnnnnnnnnnnnnnnnnnnnnnnnnnnnnnnnnnnnnnnnnnnnnnnnnnnnnnnnnnnnnnnnnnnnnnnnnnnnnnnnnnnnnnnnnnnnnnnnnnnnnnnnnnnnnnnnnnnnnnnnnnnnnnnnnnnnnnnnnnnnnnnnnnnnnnnnnnnnnnnnnnnnnnnnnnnnnnnnnnnnnnnnnnnnnnnnnnnnnnnnnnnnnnnnnnnnnnnnnnnnnnnnnnnnnnnnnnnnnnnnnnnnnnnnnnnnnnnnnnnnnnnnnnnnnnnnnnnnnnnnnnnnnnnnnnnnnnnnnnnnnnnnnnnnnnnnnnnnnnnnnnnnnnnnnnnnnnnnnnnnnnnnnnnnnnnnnnnnnnnnnnnnnnnnnnnnnnnnnnnnnnnnnnnnnnnnnnnnnnnnnnnnnnnnnnnnnnnnnnnnnnnnnnnnnnnnnnnnnnnnnnnnnnnnnnnnnnnnnnnnnnnnnnnnnnnnnnnnnnnnnnnnnnnnnnnnnnnnnnnnnnnnnnnnnnnnnnnnnnnnnnnnnnnnnnnnnnnnnnnnnnnnnnnnnnnnnnnnnnnnnnnnnnnnnnnnnnnnnnnnnnnnnnnnnnnnnnnnnnnnnnnnnnnnnnnnnnnnnnnnnnnnnnnnnnnnnnnnnnnnnnnnnnnnnnnnnnnnnnnnnnnnnnnnnnnnnnnnnnnnnnnnnnnnnnnnnnnnnnnnnnnnnnnnnnnnnnnnnnnnnnnnnnnnnnnnnnnnnnnnnnnnnnnnnnnnnnnnnnnnnnnnnnnnnnnnnnnnnnnnnnnnnnnnnnnnnnnnnnnnnnnnnnnnnnnnnnnnnnnnnnnnnnnnnnnnnnnnnnnnnnnnnnnnnnnnnnnnnnnnnnnnnnnnnnnnnnnnnnnnnnnnnnnnnnnnnnnnnnnnnnnnnnnnnnnnnnnnnnnnnnnnnnnnnnnnnnnnnnnnnnnnnnnnnnnnnnnnnnnnnnnnnnnnnnnnnnnnnnnnnnnnnnnnnnnnnnnnnnnnnnnnnnnnnnnnnnnnnnnnnnnnnnnnnnnnnnnnnnnnnnnnnnnnnnnnnnnnnnnnnnnnnnnnnnnnnnnnnnnnnnnnnnnnnnnnnnnnnnnnnnnnnnnnnnnnnnnnnnnnnnnnnnnnnnnnnnnnnnnnnnnnnnnnnnnnnnnnnnnnnnnnnnnnnnnnnnnnnnnnnnnnnnnnnnnnnnnnnnnnnnnnnnnnnnnnnnnnnnnnnnnnnnnnnnnnnnnnnnnnnnnnnnnnnnnnnnnnnnnnnnnnnnnnnnnnnnnnnnnnnnnnnnnnnnnnnnnnnnnnnnnnnnnnnnnnnnnnnnnnnnnnnnnnnnnnnnnnnnnnnnnnnnnnnnnnnnnnnnnnnnnnnnnnnnnnnnnnnnnnnnnnnnnnnnnnnnnnnnnnnnnnnnnnnnnnnnnnnnnnnnnnnnnnnnnnnnnnnnnnnnnnnnnnnnnnnnnnnnnnnnnnnnnnnnnnnnnnnnnnnnnnnnnnnnnnnnnnnnnnnnnnnnnnnnnnnnnnnnnnnnnnnnnnnnnnnnnnnnnnnnnnnnnnnnnnnnnnnnnnnnnnnnnnnnnnnnnnnnnnnnnnnnnnnnnnnnnnnnnnnnnnnnnnnnnnnnnnnnnnnnnnnnnnnnnnnnnnnnnnnnnnnnnnnnnnnnnnnnnnnnnnnnnnnnnnnnnnnnnnnnnnnnnnnnnnnnnnnnnnnnnnnnnnnnnnnnnnnnnnnnnnnnnnnnnnnnnnnnnnnnnnnnnnnnnnnnnnnnnnnnnnnnnnnnnnnnnnnnnnnnnnnnnnnnnnnnnnnnnnnnnnnnnnnnnnnnnnnnnnnnnnnnnnnnnnnnnnnnnnnnnnnnnnnnnnnnnnnnnnnnnnnnnnnnnnnnnnnnnnnnnnnnnnnnnnnnnnnnnnnnnnnnnnnnnnnnnnataacgaacaaatcacggaattagtagggtctgatgagctccacgaggagaatgtagcctggtgggcacttcttgataatcccgaactcttcaattttggtgaccagtggtggcgagtcttcgatatcttgccagagttagccggccctttgaatggttatagccgcctgccagacccagaaagtatctcacgggaaagacaggattttaaggagagactaccgaccctcaaacaaagcgacgaatggacggcgaatcgtgataattatattgaaagagagtttgcataccttcgccgaatagcttcagagggctatcttgctattgcagatcaggaagcttttaaaacggatatgctacggttaatctattatgatgggaagaggaatattgtccaagagacccggacagaattcgatgagcagacatttgctgatgttgccgttgaatgggatcagttgtcgcttcctatgcaattatgggaggacggaaagactggtgagaagtatcgagtgaatggggagctgggaagggagttatatcagctagatgaggctgatctggaataagcatggccatgtcgaatctggtggactcgtggcacatgatctcgttcgtttgctcgttgggcttcatgtatttaggcgctgcctcttcaacagagggactcttatcttcaagcatcttcatcgtctttatcgtcaattcaatcgtttatcgtcgctccaattgcttgaacatatgagcgttactagcgccaatatgatagcaggttggaatcaacggacaaattctcccggaccccggctaggatgcgtattgaccggtcataaaacatctggtaaagtcgctccctccagaacagtttacggtgacctccttcgtttacgtcctcgtctcctctattcatctcggaagcgcctcagagggtaaattggtcctgcgacgggtacgtcgcaatgacagtctaggatctcttcaaatctctaatcctaccacagagtcaatcactcaagaccaactcctcgcaaaaagatgcacctgaggccagatcccagcaattcccgcagctccacgcacattgagagagtcagacattcctaatggcataggaatgaaacccgattgatgagggaaccatgtacaggtctcaactatacgtatcactctgttcagcgcccctggccagcagcagccgcattatggcctcatgtccgttggatgatgcctcttcaaacgcactgccgcggtctccaccccgtacgttgatatcggcacctcgagctagtaggatctgcacaaccttttcatgcccctcggctgatgcagcttgaagtgcactgtggagcccttcactgtgagaattgatgtccgcgcctcggtctagcagaagatgcacaatcttctcatgtccttcagatgctgcgacatgtagtgcagtgccacactcctcatcattgagattgacatcggcgccccaatctagtagaatctgcataatcttctcatgcccttgaaatactgcagcttgaagtgcaagtgacataattctcactgagattgacatcggcgccacgatttagcaaaacctgcacgatattctcatgacctccaaacgccgcgagttggagtgcactactcgactcccaattggcattgatatctgccccccaatctagcagcatctttaacgtgtcttcaaaccctttagacgatgcacacatcagtgcggtaaggccgctttttcccggggcattgacatcggcgtcacggtccaacagcatccggacgattgcattttgtcttttgttcaccgcgtgagtaagtgtcggatagacgggatcgcctttgatactccgatctgcggcttgcatactgagatccgcaccgtggtcaagtagcatctgcacaatggtttcatggccattggatgatgcaaaatgaagcgcagtactgtcatactcccctttccgagcattacactggcgcctcgatctagcagtacctgcacaaccttctcatgccctctttgtgcagcggtgtgcagtggattccagagttccccttcctgggcatcaatatcagcaccgtggtcgagcagtgaccgtacaatattggcattcccgctgaacgacgcggattggagtgcactgcctttatccaagtccgaggcgttggcgtctgcgcctcgatctaggagcatttgtacgatctcttcgtagcctcgatacgacgcagcttgaatgggaggactgtcataatattgcaactcttggtatttctcattttaatgatactaggaggaggtgattgctctagcgatcctcgcctcgaggacttcgcccaagtaatgtcagctaccttgctctcctttttgcttattctcaaagtgaggcgatatctggcattctcatcgcacttgcgtgcacatactatatccatgtatgcaatatcctaccccacaccgagttgggcggataggttcgtgccggcgtgctggcgggctgtcatatgtatgagatgcatactcgtctggcaccacgacaaaagatagagacgccaggcggcacgttctgattggggttttaaaggaatgtaagctacgttgtgccaataggatccgttgtctgcccctagtgcgggctgctgcatccgcgactcgaaaatcatagaacgaggctcgcaggaagaacagggccacgttgcaaacctcatgcaaggcctgtgaggtgttaagtctgactggagtcccaggaaatcgttgacctcggtaccaaagaatatcccaggcgaagatgactcgggttgcagcttgggacgctctcgaccttcaaattcaacgacgggaaggggcgtgtgccgtccaaaatctatttctcgtcgaaacgagcggatggcaaaatggagaagcagtaggcaacgttgtcgggtcaagtagctcggcccctttcgagataattgtccagatggctgtgtcatgatatcttttgaggatttcctggcctgcaaggaaagcattctcttttttcagcagggagactgctcgcgcatagtcaagcttagagatatagtctatccattctcgaactgaatgtgcttgacggtgtctcatctcaggagggccggatactcatcatgaccacgaaccataggcttttctcctaacttcctccctccctcgctcgatggcgatatactttgcttcattacgctacttgggtgaattttctggccactttctggttcgagcccaatactcgacaggcaaaacctgttgattggtctcgctgaagactgtagtggcaaaatcatgccagaggttgcaggtgctttcactctgtcaacgtgtaatgttcaacattggacccagcgttactgtacgtgatcggcgccctcaattaattgagcgcgttgaaatctgtcctcccggccgtccgccaacgacctcaacaagcggaagcccttaactgctggagacatacatcttaccaggcatgttcagtccttacgcaggataccgaatgctcctatgatgagacattacgttcctgggaacgaggtgtctgttcctacgaaagggttgacatttcacaggaatagcgtacccatacttgtgagtttatccactttcaggagtcttacagctgttctgtggagttgcctcgcaccgagtccgtgctcttgatagtctgcattgtggcttatgtggtggcttcggtgtatctttaccaacgagctccagaccctggtggttactagttttggggctgtacaatacgacaagttctcattgtgaggtgaaagcttattgtggaggagagccagtcggccactaataacttctgggagctgtaggtcctctgagaattctccatacgtgtccatgacagttgtactataggctgcgtcgatcgaagatattgcaagcgtcttggttggcgagtgtgggttttcgtaagtgtgttttgcacggtcatgttttgctactccaaggtggagaaaggagtgagagaggaccaatcacacgttatatttccccccgacacgcccattggatacatggttgtgaagcgccttgttttagacgacatgatttatggcttgctggactctctagtcttgtgcggaattttgcagatgttgattgccaggactgaggacactcccgcactatcactccaaatataccgtgtgattggttcaccgctactcatttctccaccttggagtaactaaattatttgttccaagaggtaagtcatatatctgtaagagtggtatcatatgacgtatagcctctcctaaggcttgtgctctccggtgatgtctcatataaacgtattactctcaagaggatcctcacaaaagggtttccctctgaaaacagggcccttaatacgttcttttcaagctatcgtgattccagcaacgcatgattgtactctcgtgatagcctgcttatagtgaaacacacaaaatcctctgtacgttatacatgcagaaccaacagatgcctctcggatggtaaaatgtcctgagacgtttctctagtaagtacactcatgtttgtacaaccaaagctcccagggtacgacctctcggtccggagctatacagttcactcccgggagctgtaggtcctctgggaactaagatttttactcctgggagcaatcataagcgttgtcaaggatatacatgaagcatacggaatggatggagatatgatctgcgcgggacccacttagtgtatatgggttcccctgaacgcgagaaagctacctttcttttgcttcctcgcgctacgtcttgtatctagagtcaaccatagttgttcttaatatcgattgttcatcttgaaacactatccacctctatgtatacgtgagaccctcacaagcatgcctaggaaccatgccataggtcctggggtcgaatatgatcccaggaacgtgagtgtcgcactcgcgagataaaatgtggaatctggaatgggtaatcaatattagaaatacaaattgaaatgcgggcaataagtgcgggcaacagaaagaagtgattaactgggccaaaaaaaggtgaaaagacactgttcgaagagagaaatgatgttgatgaacgataaaatgcaacagttgtttgggagttgactcaacgacgctttcctcgacacatatcagtagaataaacgaaacgtcatcgactagtggatgatagacaaacatgagggtcaacgggcaagcaaacttgtagccggtgattaaaccaatgaattggttgtctcagaatccgagtacaacatggtcgaaaataataaataaacgaattcattcattcgttttcttgttagaacaagtgaaagaagtaggggtgtttattgaatatcattggctagacaacagtctctactctaaatcacgcgcatttcctaatacctaggtaccccctaagtctactgtaagaatttatttcaccctgctcaccctaagtttgatgtcttcctagataggcctgtggtatgtccacttttctgccatatttcctatgtctccggcctaagcgctcttgttgtacctgttggctaataacagttctctataataattaaaggaagccatgtactgaagctcagcgtggaaaattcttcaatctttatgagaacttcctatcaatctatcaataggcctaattatatatatagaaatcgacttgttgctacgacggtgaattatataagcgataaaccgaccatataacttgggccatttagattcccgtgatcctcgggcgtattgagaacccatgcgtatggaagatcaatccacttcggaaccacagctcatcgtgctttacagcaatattcgaaattggcttccatgtgttacacagagaaattgtctctcgccccaccgccaagatacttgtacccctcactaggcccgtttgggctaggccacagatcagctctgctcctcttgatgaagggtcctcatttctcgttcgtccaaataatgactggaatgactgggtgttgtgttttgactctggagtctataagacttggggattgaaacttaggcgccctggtaggggtcaacatttgagtaataaaattcttcagcggtaggatcccgaaagcgattgaagatagggccaagtcagccgcatgttctcttagatcgaccaaaaccctgcccagtgcctccatcacgcgtcgttgattgccacccacagtccctattttgtgaatacagtacttccaaaagggggaacgcatctcagcttgctaaaaccaaatcatggaccgccgatcattaccgaacgagcttatcgaagcgattctcaggcaagtagacatgcaaaccgtcctcctcgcccaacgagtctgccgacaatgggccctatgcatccgagcatcttctccaatgcaacaaattctattcttccaaccagcaccagccaacaggccacgccaacaaaaccccctgctagcatccaaatttccatactggtttcccgccgatgacactaagtcatgtgccatcgcctttggcgccggcgacatgcaggatttcctagagagcagcgacatatatcggcggccggaggcgagctggcgccgaatgcttgtccagcaaccacctatcatggcgctgggatgggtggagcgtagcgtgtcgccatccaacgtgatagacctgcatcgctgggaaattccactgcaagcacttggtgggttacaaatgaacatactgtacgatctggtcgtgaatacttcggaggttgcgccggaatacttctatttcagagtcttatggtcgcaaagtaagactttaagcagtagctttgctagccttcgctcagatccatgtccgtctttcaattcggacaggatcgatgggccactcaggcatgcaatgcagggtgcggatgtggttcttgatatgtggtatacaagtcaaatgaaaaatcatctctggaagggatggtcgaaagatacgtggacatgggagcttgtgcgggggctgaagcttgctatggatgactttgatattgatctggtgcgctgcatgagagagccgaaggaagtcaagagctggactttggcggaagagttgagtgactacgctagagaagtaggacccgtcgaccatgctatgcctttgcctgatgaggatgacccggacctgtaatgttaaggatttggaagtatctgaaactcatgatattatttgatgttatggttctatggtcgtagcctcgtcatcgctatgcacagtagacaaccccgagtctgccttgaatcgctatctcttcgacggaccgagcttgtactcatggagtatcgaactcaggccactggtaatcgtcataaatttgcgagacgggtcgtgcaccttttgtctttcgagacgaacggcgaatggaatggtcgtagtgtatgggcgatagaagtgctcgaacagaccgcatctgactccgtaagccgcatcggtttgagggcaggaggatgtggtatatacaatgattcaacgatctcagcgtatctgctttctgatgagcagagctgatctgtgacctagccgaaatgggcctagtgagattcactatcgtcttggcggtggggcttgagatagtttctctgtgtgaaatgtggaagccaattttaaatattgccgtatgcttactaccttgaactattaagaaagaccactaatggttgttttaagtcgctgactaagatgaaagcaaataaattattaattgtaaaggttctagtatggtggaagtaccgcttttatgttacgactttatatatgttgttccggcgtatctttattaataagatttagatcctagtcggttactagttttggggctggatagtaggagttcttaataggttaatcgactttttatcagagatatagttggaaatatactaattgcgagctaaggaaagcctaaaatcccgaagtatccgctgataagagaaagacttagccggtttcccgaaggcgtatactaatatagacgttagtattgtatatcttactatattcggccgccttttttataaggcttgattttcgacggccttatttttggtgcttagactttctaaccgatttagatcgattgcactaggcggaagaagcggaagctatataaagagacgcgtcactattagagaagactgaaggaagcagtaacctaaatagttgtaggtatagacgaagtggctcttagggattcttaaggctataaatatatacaaaacggtcctctttatattcgtgggttttcgcgttaaaaaggagtggtacgatccagaaactgtggtctttagagtttatagctaacaaatacctaaaacggtccccctgtaggtgatagattcatagcgggccgaatttgcgttgaaaactacggctagaggcaatcgaggagtgtgctccagaaactacgggttttcgagtttataactagtaaaaatccgaaacggtcactctagtaggtgatgaacgtaaatatagaatgcatcacgtcgaggtctgttaataataaggaatttctaattttgagggctaaaagtaaacaatgaatgtctgctttagaaaattcggttaactatatagcgtagctagcctaaggttctcgccttaagagcctttttttattttattttccctaaaataactagtcaggtactaactagaataggaatggtacttaaggcctggagaatatggcagaaaaatgggtatgccaaaaggacatctttcttggtgggtagggtgaaataaattctttgtagaagactgggggctggggggggggggaagggtttgcctgggtaataggaaatgcgcgttattgggagtggagactgttgtctggccaataatattcaataaacaccctacttctttcactgtgtttaacaagaaaagaatgaatccgtttattgattcttttcgaccatagaccaccatataattactggctgcaaatttcttgcccgttgagctttaagtttccactactacggtcttatatagtactactgtgtttctgttctctttacagtattgctgatattgtggaaagtatcgttgatgtgtatggtctctggcccgaaattagttcagcctggtacctctgctccattccgagccctcggaccaaactgggccactggaaaacagattatggtctctagagagacgacactaataggatctccgaggccttaaagcctagactattacaaaataggaatctcccgtcaatgcgtatattagcgcagatcattgtgtggagactaggttatggcactctaaagtggagctgggagtaaaatgggccaattaagcctagtgcttgctattcccagatgtggccgcaggtcctctgaggacgactgaagggtctctgaggtcggtatcctcttcgtgatgattctaaataattctaatgaagaaacttcagctagtttcgcggtctaattcatgagacctatgtctcctttctctgagtatgcgcttgaggtttaaggagcaacaaagctcccagggccggcttcttggagctaacggggcagtctctagggtcgacttcctttaaggatgaggatgaattaagaaatatcagaggtagtttcatacacaggccctatcgactttaggaacgtataggctagctctgggagtttcgctgctcctggaacctcaagcccttaaaactttctggtcctggtatgggcaaatttactcctaggagggtttgaaagctcctaggatcgcgggttagctcttaggggtgtaaagtctgtctctgggaatatgagccgcccctcctggaaactacattgatcctggaactctaggttaagttcctagaagccgctattggcaatcccaggattgacgaagatgcctgggatcagaattctttcaagtatggatgaagaaactttagcgtagtttcgtgtatggatccactcctttcttttacagcctcatagagtgcgggaacgtattggctagtcccgggaaccccactaccactggaaccttaagccgtccgtagaggttaataggggtctccgggtgactgaagtgcctctgggatcgcttagagtgtccctggtattgatgttagggatatacggagtatgtgagcttatatagcattagctctatcagccctaagaacgtgtaaattggccctaggagctttgtgctcctggcagatatatgtcctcccgggatcgagtggaatgtctctgggattggtatctacgagggtttctagtaaatatccgcgggttcatatgtctccttttcttgcagtcctatgagccctattttgatataagtaactgtcacgaggtatagatagctaggatatgctgtctattcggagcaatctaacttaagcttcgtacgttggggactgagctatagtaatgacgtcactcgaccttattggtggtgataagtggggctcggtgtagattcataactcctaagtcaaaatggactatatacccttaagaatgcaagggcttaatattgaataacgcgactgtacggtctaccatgtcggctagtcctataaggactgctctggtggagagtatatcaccgctaacgcagacccactcgaatacttctaattcggaacacgaccgttcggtgaagctgagcgttgaagtcggcatatctaaagacgaggcatataatccgttgtagctaggatacctgcctgggcttgaagcacaatatagttaatgcaccatggaaattttaaagcatatgataagctaattagctcaattttttttttgaggttgatagatggtgggaaagatgaggagatgggctgatctactagataagacgtatattcgttcagaatattatgtatacgtgctgatattctctcaatttctaaaataagtgcggtgtagaaggtgggtaaggataaggtattcgattacatttagctcttgtcccgcttgacatggaataaaggatctttttcgcgggaatcggcaatgaagaatgagggtatgaatattgaaatatgaggtatctaatgcgggggatataacccctcgagtatctatacaatttttaagtgatggtaatgaagctctttttttgataagtggtttatctctggcatttttgatatatttctgccggctgcttgattctactgagtatttggatggagggctaaagtacgtatatgtcggtgtgggccgtattgtaaaatgtagggtctaattaatggtgttcaactctctgtattgctgtatcgactttcctaacaatttatatgggccgtcaattactaatctaaaattacaaaatgtataggatcaatggatcctccggtatgccggtatgccaatgtatctattccgatagtatatttatgcctgaggcaccagttgactctgagtttagaggtgagtaagctggatccctctatgacagtcctttccccttgccgaacagtgggctgcctactctgttaacttcattcgattatctgttgaatacttcttttaacaatggaccgaggaaacaatcgctgaattacgatgtcagcttgaaaaataataaaggctccgagaagcagcagagcgcagctagagggagagagtacggcgactctaaccctaaagaagggacttgttgccctaagggaaagagtctgtacggttggtgatagttgcaatatgtcatgcctatcgagccaaaaagaaataggttaccacatccattgtatagatttcctatcgctcgctatgttcgtgccttcgcttgtgagattataagaatctataactatgttgcttagcctcctgctaacgacgatatgcttgcttctatttccgcgactgggatagtacgaggcttaagagcttattatgtaggaatgtatcttttaactcgttgatgtcgcagagagcactatatttaagggtgatcttttttctaatgtgtggttgaccatttaggaatccgtgtatcccgctctatattaataatcctgccgttgataagtcgaaagtttggagggatgtaagggagcttaatgattgtgctatccgtgttgccgtctgattgtatagagtctgtttgaggtctgttttctgggaggttgtagagtgagaagtttgtattaaaagttttgcgctttgtaggaaaagcttactataacagtctctgactggactaatttgcgacgcttttcccttctccgttggctttggattgcaatctggtagaggtcttttgaggctagatgtaggcttggtattttccggcttatatactgtaggttcagtcagcctataggagttggtagtatttgggatcgtttgctgtaggtcctcgtctattttctgctcgattttcggtccctaaaatgcctgtatgcagtttggtagaagtaatcggagtgagatagaagataagcactctatagggccgatttgttaaacagatatagacgagtatgtgggaaaagtatcggtatataggttttaaacttaggttggtgctattttgtttaaaccaggaggatataaaaggacctatttatactgtctaaggtgcctatcgatcgtaccttgtgattgaactaaagtaactaccagtacctctcgctggtggcgatgatatgcttgtcgcagtctgggtgcatagtcttcggaattgtctcgtataagtagtatggccgagatagccaactttctatattaagcaatatcgatctatctagacggggacatcgacatcgatgtccagtcctagggttccctcattctaagctgtatgtctatgggataaggcccagcctaagggtattaagtgtatgggtgtctgggtctaagataaggctgatcggcgaagctggggattggatggctatcaattgttcccggtaagaagctatatctggctgctgggtggtcatttaaacctacgttagcctggagcgtcaatcttttgagtactagggttgagtatggggatgatcggtgaagttgcggatttgaatggctatcaattacccttgagaaggtgctatgttagtggttttcgcgtaaaggcctatctagctgcctttagggcgtaaagcgaggctcgctggaatcaaaaatagtgactctcgttttattgaagggttctgtggaggctgtacacttgtggggaagacatcgaaatgtataattcagattgttgattgtcgataaagctaatactgaagaaagctatgtaatacggaagaactccaatatccttgctaatatatgttacctagggcagattgtataaggatgatatcctgtacgcgttccggcagggatatatggctcgagataggtggagcattgagccgcgaagcagctattctgatcgagaacgccctgtaatattagctgatttcggatgtataagcggacagtctttgtgcttacagaaaagaagggccgcttgatataccctggtctctgcttgataaatcactacgtcagtcattaagcctatgaaaaaataatagacgacctacttatatacgataagcttcagccctctaatgcgcggatcattctggatattacggataaccagcggattctgcaatatagcaggaatgaaacgactaaggggagtgagtgaccctcctcgaaactccaccctagtggtagtctcttcgtctcttgcgctttcgtcagataaataagttatggtgctagcggggtgagactcacagtggtatgccttcggtagagtattcttgccaataaatgaagaaagtacggcttaggttggccattgggacgccagataggttaaattctgggttaacatcgataattctaatgttgaagaatgaaagtgagggtattccggtaagcctgttttgtgttgagagattttgctaaattatagggctcgaggaagaggccttatggagtaaatgaaaatagagttgtttggggaaccataggtgcagagtgaggagaactatatattcaagctgtcagtggacgataggtctaggtaatgccgcgagatttagggtgattggaattaattctttctttcctcaaaatcattatgtacaatacccgctgacagaataggtcgttgattattttagtgcctcacgcgtgataaccggcgtttggattacgaattggtagagaggcttgaggatttagtattttccggctcatttatagtaggtttagtcagcctataggggccggcagcaattgaggtcgtttgctctaggtcctcatttattttccactcgattttcggtctaaacaaaaaaaattgcttgtgtgtgtagctttgtagaagcaatcgaagcgagatagatgacaagcactttatggagccaatttgtcaaatagattcaaatcatgtagacgagtatgtggtaatatcatcaatggagaggtttcgagcttaagctggtgcttctttatttaaaccaggaggctataaagggacatatttctactgtctaaggtggctatcaactgcgcctggtcattactaaagatctagccatggtgagtacccgcccctctctctggtgacgatggtatgcttatatcagaagcccgccccgattcctgtccaaatcctctatgggccggcaaaaattgctttggaggcaatgctcttcttgagaattgtatctctatcactcttggaatggaggccctcggaaaacctcagctaagatgctgaaatgttgctagatgcctgcaagactctgagaagcaggggatcctaggaaccctatctcgaaaatgacttacacctccacgtgggaaatatattacccgatctcagttatggtgctgttctaatgctagcgctgatgacttggtattttgatgctttatcttctaaagtatcgcagggcttgattgttttcttgagttggccttacgatagtgaagtgaagggaatactttaggatcgatattgaagtataatgtgcggaatggactcctcaaacttcgactttttgcttgtctggaattgagccctacctagtgatctgtgtaactggtaaatatgaaatgtattatatctgctttgcttagtagtaaccgagctttctgaaacggttataaatatcatcgagacattccttgtactagtcctttaaaatgttgtggatcttaaatccgagaaccttcccaagtttgtacctttttgtatattcctgcaggtatttggaatgaaggtgctggtaacaaagagctttctttgagttgagatcttccactggttgttgcaaaataatcggattatcgccgctcagaggaacgaactttgtaatcccatattttcctaagacccgtgaaatactaacctcaagtaccgtaagatccactaggaatgctttatgctgatcgccaagctcttgaagagcaatggcattaaaaaccatatcatcgagaccccttcttttgatgtcttccataagtgtgagtctattgggatgaaactaaattcgtacggtcttgtttggttagagcttgtgttaatgtggagaaagggtgacttatatgtaaacgaatcggtactgagtttttggcagaaagactagagtctttcgtagatttatgtatgttacttcgattgggatctgggcctctaaataaaagcgtttcgcgcgagttgcctggggaaaagaaaaaggaggatatgcagttcgaaaaaatataacgaactctaggtaggctcaagtagactatggtcttgcagtcgtgaaatcctggttaatgattcggataaacctgaggaacagtagtttatatcatgatgatctagcagacttgtcatttcttttgcatatgctactgattataggtctaggacagtggcttggggctctgaactacctggtacagcgaaataaccgtttagtctccaaaacgatctatggctggcgaagcgatccgtatgtgtataagtagaaactctactttaagatactctatgcctgaataggtttagatctgaggttagctccgttccctgaaatctaagcctttttaggataatccctgtactcctatttagataaataccagctccgctagccacttagatttcctttcctaaattgaaatgcatttaccggaagaccttagagaacagcttacatttgcccttggggctgtatcaccgatatatatcatttcctaggtatcaaatacttttaaatttacaaaaactgtttactactaagttaagaaaagggctgggatgggctatttaaggattttttctcaaggggaataaagaatgaattatagtagctgctcctaagagaatacctccttgtactaacgatatcgtccgcctcgcactcagctaactctggtccgagttcaagtcccgattgtacctttgctttcggcttagttgagaattctagtaaggccgcagcgagcgaagtggtacgcgatattgttctaataccaatgtcgaactccagccgcggcgtgaataatcctgtttgtactccttcggcctatgcttaaagacctatctcattttcgagtacctgtaactatacctccgtgtacgattttacgcctaagccgcgccccaggcctgagtcacccttacgggtttctaacaatgtgcttcgagctatctatgctatgtgtgaggctaaaaggcatgatactacctattatgattctatctggcttggactgcagaaaatttctgatgactaggatgttgaagaagttgcattgaatcgatatggccggatataagtactgtagtccaggaacgatgctaggggcgatatgttcaaatatgcccagcgtttcagccttttgcttggagcttaagaattgcaggttatagagaaaacactactaccggatgtgtgctctaggggtgtaaccctgagatctgctgcaattagcaaactggccgaatacctcctcgttgaaaaacgacgtatattagatgaaaacaagcggcgctctcattacgtttcagtatgtgagcttttcggccccggtgccctttttttgcttggagattctgatggagtactttctctgtaggttacctaatgaggaagagatagcccatttcctgttcttacggtttctagatgggaaagagacctgaatgctgaagatatggaatctttatacaaatatgtcatatgtcatcttaaaaattggatggctgactgtaagaagttgaacgaaaaggccgtgaccttagtgattgaaggactccgtgcttgtgggtgggatggacgcttgtaccgtgataccacatttatgaaatgcttggctggttatgtgaatctggaatctttactctccgtggcgactagatatgatgaagcactactaagaaaaaggaaatatcccgataaagaggtatcatcgaaacgctatcatcaggatatataccatgatcctatcttagatgaggagtatccgatatctctacgagtcgagttaaataaccgttctggtgattagtttggggaatcgcaatcgcaatcacctggaacaaattttggcacaacgcttgactgggactgcagtatcaacttgagcttggattgggaccagtttattgatgactagattacagaaagtatgaatgtatgattcgctggggattcgactggaggcatgagggccattttataatcggggatttcttaggtttaatcatcagaacccattggaaaagacaagaccaggaaaatccccccgccaccaggggaatggaaatacaccagatctcccctccaggccacggcgtctcccgcttcaaggtccaatgctaccttccttccaaggcgcgatctatgttggtgagacccttcgtagaatgtaaaccaccgatttgacggcgatagcctcgtaattgcgatggtgacgtatattctcggtccagctgtcatcagcttagttgggtcggcatctgtttcgtggaacatcccaagattcagggtctgcggtgaggaaggagtttggtttggataaaatagcggagcgactaaatctttgtccatattctgatcggtcagcgagtgctagcatggaaaaggagtgagtgatagataccctgaggaattcatccttgatttcgaacccagtctgaggtactttatactcgttgtatttgtcctttgtggcagttggtacattgtggatgagtccattttggaaatcatcggcgagttttgatgcgactgatgctgatactgcctgcctcagcacgacataaccgttcgaattggccatcgttctggatcgaccatgagagttggttttaaagacctaataaaaccaaatagccttcattagagataaaacagaaacttatgtattgtcatattaccttatagtatcgtcaaagtcgctcttgggggatttcgccataaccttagcactgaaaccccgcgatcaggaacttcatgcccaattctctgcttacaaagaactcggcggcggggtacaaagatactaagatcacgtggataaaacgtctcgaaatcttgagacaagttaaagcggtacccgtgcagaatctatgggcatctgaaaggaataaacagtagaagaagaaagaccaggctgtgcacacacaaattccgtcccacaatgttggcaggtaaatctcaagaggccacaaggactttcattttgggcatggctggcgaaaccggcttctctaacctcaaacggctaataagcagtaaagtatttaatcacttttaaaacaattaatcactactaaaacaattattcaactcgtctgctatattacatattcattgcacgcacgccgactatcgcgtatccgttccgctctgaagcgatgagtaagacctttccggagtcgccgcagctagccgcatacatgggcctgttgtatggatatgaggactctgaaccctcagaaaggcccaaccatcggtcggttttggctaagccttctatctcattgatccttgtcgtcgcctactgtcagccttagctgtacttaaaccactatttttgacatagtcagaagtgtagcaagcatgaatctgtttctgatttgataggcgctagaacatattcgatctaccagcatgatgacttattgtctctttggcatcgtgcgctttcgttgtctctaaaacaagacgttctattcttttcctggcagcagtaccgtactgtaaatgaaatcgtgtggtacgataactttgcggtgatattacaggcgacacgcggttcagaacatccatgtttagctctacatgattgggcgaagaggcaccagatctaaagatcgtactgtgagaccgaataataagggaaagcacccggaaacggagaatcaaaagagtttgtattcatcaatgtgtgtgtccataatacagtagctgttactcagatggtctctaggcagacggcaccaacaggctttccgaggcctaaaagctcaaactagtacaaaataggaatagaggctgatcggggtttccctgtcaatgcacattagggcaaatcgttgtatagagactaggttatggaactccaaagtggagcaagtctagtactagccattctcattagttggcaagagccaagaaactaatcagctagcaatattcaagagacgatcaaattcaaggagactcgtacgaaaatagaaaataaaaataaaggagannnnnnnnnnnnnnnnnnnnnnnnnnnnnnnnnnnnnnnnnnnnnnnnnnnnnnnnnnnnnnnnnnnnnnnnnnnnnnnnnnnnnnnnnnnnnnnnnnnnnnnnnnnnnnnnnnnnnnnnnnnnnnnnnnnnnnnnnnnnnnnnnnnnnnnnnnnnnnnnnnnnnnnnnnnnnnnnnnnnnnnnnnnnnnnnnnnnnnnnnnnnnnnnngacttgtacgaaaatagaaaataaaaataaaggagaattagcagcagtttcgtaatgggcgtctcgccgtgaaatgcaacctgcgcacaaaaatttcatttgtacaccaatcagcgtcaaacgtgcattttggcgcgcggtaccttctatgcacgtagacacatgcaacaccaacttggcatattgacgagaatggtctgagccatgatgaagtccttgatgtttctgctcaacatataaagagacttgtacgagcgtaacagcccactcatcagacctcaatagctttttcagttaccacaacatttcaaaactctttaaatatgtctttcagtgtttacacggccgaatatcttggtgcacctaaccatgaagccatttacattgaaaccaatcccaccgccccccgaatgtctgaaagaggacgtctctatcatgtcactggaaatttactccagggtatgagatacgacccaagaggttcctttgaccctgaactctcggcgtcttatgttccaggcacgaagaaaattattggatccattgcacacacagatttgtccagatttgagacggagtgttgcagagcagtcgaggcgcctcgagcccagttgacgcttgggggtaaacagttgtatcctggtacaccactttatcgttgtggagactggttgcgagacgttcagaaattggcatttgaaaagggcatcttaaagcggtagaatgaggtaagtcaatcaagtccatttatcaaggtacaacctctgacggactggatccgaaagcaagcgcacaggtacttcagagcccttgtaaaagatgttctttctacagctggacgtatttcccaacatatcccgactctgggtcaccagcgcaattttgttctttcctcgtgttctcccatcgaatctatgattctcactatatgagcgggagattcacagtgagattagtttgaacgatctcttctctccggttggggtgttgaaaagaggccgagaggttggtttcgcgtacaagaaacgtaaaatgcagagtctatggctttccttttgacgactaagaccaatgttttatattttcccaatgtaccatcagtagaagaccgacgagtagacaacttgcatcattaggtattcaaccgggtactgatcaaatatatccgggataagctcaagccagtccggtttcatttgacaatacaaggttgaattgcaaaaatcccaaaattcggggtaccagcctgacaaattccagtcgatcagagtaactttgaagtctgcgtctccattgttgcaaaccccttttcgctccacaattatgttcttcggttgcagatctccatgagtaaagacaattcgatggttcttgagagtgcggttgaccatttctttcaacaatcgaatgtagtgtggagactgcatttggcccagtctctccagtattccttggttcatctgcttctggtccttgaatggcccggaaatgattgggttgttatcaggggttgaaagaacaccgtcgatgtaaggcgtgccattcaagttcccaaagtagccaggtgatggtattgctcgcagttcattgatcgcctgtctgatcctctggctgatcgtcgtcttctcagttggggtgagcgatggcagtaatttctgcaagtctgtaccagggacgaaatccataacgacatatcttttctgggtctctgggtcgatgaagttggcgtgaacctttggcacaggaaccttgctgttggctgcaacaaatttcacgttctcagcttccaaaggcgggatcgaatacccgattttgaccgcgaagcgttccttcactcgaaccactttgatggcatttgttcgtatactaaggacatcggtcgatgttgattcatctgcttctggtccttgaatggcccggaaatgactgggttgttatcaggggttgaaagaacaccgtcggtgtaaggcgtgcaattcaagttcccaaagtggccaggtgatggtattgttcgcaattcattgaccgcctgtctgatcctctggctgatcgtcgtcttctcggttggggtgagcgatggcagtaatttttgcaagtctgtaccagggacgaaatccataacgacatatcttttctgggtctctgggtcgatgaagttggcgtgaacctttggtacaggaaccttgctgttggctgcaacaaatttcatgttctcagcttccaaaggcgggatcgaatacccgattttgaccgcgaagcgttccttcactcgaaccactttgatggcatttgttcgtatactaaggacatcggtcgatgcctcaatgtcggcaatagttggtagttcaatgatcgattgaagctcgttatccatctcggtgaacaaaaatgatgccgccgaagtgcaacaaaggatttcacgggctttatgtattgttcgacaagagcaaacagtgcaaacataacaccgtcataacacgtgatgaattccagtcggccattggtttatcacgggaaaagaaagggcttgccgcgagtatgacaagcacgaccagcgttaggcccaaatttgccagcatcagctgatactgttatggactttgactgacgtgctgtaccctgcataggccccagcgagttggatttcaggtcacgtgacgtatatagatctgttggggtggagtgaaaaatgtataagtcgtgcaacagaactattgtggatcctcacgaaaggatcagataacttgaatggacagagtgatctgagaagactaggcagtctgagtggacagagtagtctagtgttactcccccaattttgttttaagcggtacttcgtgcgtgattccccacctcgctcccaaccactccttgaaaagtaattgtattgatttgatgatatccctcaactacccccttggccgccacaaatatatggtagaagtgtgcctgtcagtaggcgacgactacaactaccgagtactttgttaaccagttagttagttaatgcaaaggaggcctggcaacaacgcgaccttagtatctgagaaggtctatcagagggtatgccacgtagggtgctggctattactgaatcttattgacggtacactgaatattagtcatttgaataattactataatttttgtgcggtagaataatggcgggaaatggcggtgactgagagggttaacagacatggtgctgcctactttggtctagtggcaccctcagcgagagaaagagatacgctaaccgcattttgaccatctccaaaacacattggaataccaggtacgtgagccagggcaatgacgtcgctcgaccttacaggtggggatcagtgggactaggtggagattcgggactgccaataaaataaaccatatgccctcaagaatgcaagggcttcaaattggaccgactggttcggattactactggttcggcgaagctgagcgttgaagtcggcatctcaaaagatgaggcatacaatctgttgtacataagacacctgcctaaggctttaattaagcattggtgaacggtagtcaacggcggggacgagatagtcaacgcatcaaagaaatgttgagggatatgatgagacgatagttagctcaatttttttgagcttgatgaggagacggaccgcactttattggcattatggaaatttcagaacgtttacacagtgggtaaagacaaggcggttatatttatctggcatcccacttgatgcggaataaaggatcgttttcgtggaagttgggcagtggagaactaaaaaaaaaagaggcacccaatgcggctggtataatccatggggtctctaccacgcaaacttcaattgaacaccagactaccgagaagctatattccttagcaaattgcgctctttctcatgttgaacattcgcttcttgtacgtaacaattctctcccttcggttggcttccgcggataacaccatttttagttgagttctaccgtgcaagaggaacgacaaaacagtaacttgtcagccctagacatacatgctctcaacatgactctcctcactgaattccttagagaactcttcactcaattccgcagccatttccaggtatttgtagcttactggttcttcacccactgtggcaagagcatgcacaattgacgtgaggtttttgatctgattatggtcagcgggttcataaactatatggctcgcgaaagcttctggaactttcgactagcagactaaccacgtattgcactccctatgcttgctcctagaatagcaacctaaggccaatagagaacgctagatgacgcagcttttctggcatttacaatgacctatagggaggacactagtgaacatcagtaaaagcagcaataagcgcagttacttgtttgccatacagaacttgaacagaagacttgcgcctttatgcattgcctctttagctgttaacgatttacctaaacgaggctggctcaccctagcttccctatggtagtcgcccgcgggagaaaatcgacactggcatccaggtcaagaagcgatgaaggtgctcgaaacacactgagtgaggtgttgccaatttcggtctagtggcactctcaacaagagtaagagatacgctaaccatatccggccacttacgccgacagggctgttaatcggcagccagtagggttactgagtaatctggagcttctccaagatggagcaagtagaagtcaggaaccaatcacacattggctcctctgatccattgttactcccccacttttgttttaaccgattttgacggcccagattctccatggcgccctatcaatactgaacagcccacgctttcttatgtatatcgagtccaacccgtgcttgactatgatattactctcggcttatcctactccgatggttttggctacagggaaatcaaaacaaaaaaacctcaatttccccggttgctaattcgtgaaatctagtcactaaccgagcatttcaatgtagctaccacagaagggcaaggtctaaccgatttccaagcgcctgtactgtctcatcctcttcctctcattttcatttagttttctggtatatgaagggtatgccaatggacagatttgaaaggaacgaagactgaggtctcaactcctgacgctgacgttggctcctcgatccagtagcatgtgcaccaccttttcatggcctccgtccgctgcggcctggagtgcatttccatagcgtccaccctgggcgttgacatcggcacctcgatccaacagcatctgcaccaccttctcatgcccttcctgtgatgcggcgaggagtgcactgccatagaattgggcctccagtggtgcattgccatattcatcaaactgggcattgacgttggcggctcgaacaagcagaatcttgactacctcttcatggcctccaactgatgcggcctggagtgcattgccatgttcatcaaacttggcattgacgtcggcaccacgatccagcagcatctccacaactttctcatggcccccggctgatgcggcctggagtgcattgtcatataacttaccctgggcgttgacttcggctcctcgatccagcagcatacgcaccacattttcatggcctccatgtgatgccgcctggagtgcatacccatatgttccaccctgggcgttgacatgagcgcctcgattcagcaccatacgcaccaccttctcatggcctccctgtgatgcggcctgaagtgcattaccgtaccgccctccttgagcattcactgtatccgatgaatcggcatccctagtgtcaatcaggaagatactgctcaggacggattccaatcccagcaacgctgcatagtatagaggcagtgctatattggcaaagggacggttataatccacattcatattccacggacgatccatgtcatgcaaccgtatccaggttacgaaagccttcatgtcgtctttgaaaagctttgacagtaatttttcgattgctgtcttcccttcttctgagtttgcataatgatgaaaccaatgtatggctgcgaaatgagcaaaagggaactcggtgagctttgcctcatctaacagtccctcagagagagctggctccaggaggtagaccaggcatatctgagctatttccgtattcgcaggcgcacttcgtatagcaaatatacgtgagttttgttgtaagatgcgatccgacaggagatactcctggactgagaaatgcgctatgcgaacagtcacagtggtctgcctattgtagtcttccgtggctgcggtctcgataagtccgaggcaaatgtcgacaaggtcatcttgctcatacgaacgaccttgacgatcaagccgcggtagctcactgagatcaactgcgtgtgcgtcgatgagctcattagccgtgagcggtcgggtggagaagcaaagtagagtcaaaacccgccgcacgtcctcgacatattcttcgtcgatgttgcacaagattcgctcgtatgtctcatcgagatcgcggggcaatgttcttagacatttgtcaagctggatctggttgcggacccgacttatggctttgaactgacactcgacatatctgaacctagaaacggttttagtcaaaacggtgggaagcatgtctccttattgtgcttacactccttgtgcacttgttgtcaattttgcctcaatctcattgtggcgcgctttccacctctggagtttctcgtcgttcttgagctgataagagacaaagtttgctatgtctctgtcgacttccgaattcctaagcgaaagatcttggtcgcgagaaggatgtaacgattcgcggatatctagctcgttgcgacttgtcaccaaaagatggaccccaggtatacaccaactgcgtatcatttgtatcgctcttaagacgccttcccttttggtgtctcgtgggctctcgtctagcgcgtcgagtagaatataagtatcgcagaatcgttcaaggaagcgtcgaagtgagtcaagcagcgcatgcgctgggggtgatccggatctgtgcaatgcatgcagctgttctagatctctctcgccatcttgtagctgtaccgatagctgcaacagcaacgtgcgtaacatgccgttgtcgtcttgcttcgcctcgtcgttaaaggaaaagtagaaaaatgcgattccgactccatgtttatgtctcgtctcatgaaatgtatgctggattgcgcttgaacagaggaccgacttgccacatcctgcgaaaccattcagccataggaaggaattacactcctctagccaagtccgaaagtaatggccgttgacgaaccatagacctgtgcttggatgacatttcgcgcacgtagcgttgtgattgagagatgcatctggcgccataagccagcagcgaatcgtgagtgaaacttgactagcatttgttcgctcgacaagagatttgacttccgatatgccatcctggatctcgctatggctttttagctgtaggacatcgagtgcgaatgacaggttttcacgtatgtcgctgacgtcttcttcgagtttctgtaaggtacttttccgaaacggataggccgcgcgacgtccagcaactttgacacgatactttaaatcggcggccgagtctttgtggaatttctcacattcgctctgtagctcggtgatgatttcctcgcatttctgtaccgccttctggacttctcggagtagatcttgcgtgtcggccttcgatcggcgttcctctacagcaatatcgaggcctcggaaaatgcccagaagattgtcgagattctgcgtaacctttgccagatccgtgtcttggcccttgtatgtagtgtaaaaactgaccaaagactgggtgacttgaataccaagcgaaagtagtccggcaacccctgatgcgatagcgagcggatcagccattgtgattgataatattccttgagacgggggatataaccatctaaatatgtgagatagccattatctcagagccaagcttcagcctcatcgagcaggggctcagctgctttgatgcccaaagcggggctgagcatgggcgatgataagaatagaatcgaatgagagttgtatcagtatttccaggaacttaggggatttgttatcatgtgattgcgtgttacaacagattacggaattttagaaaggaactaaatcaaagatagactagcgtatatcctcgctttgtgcaagccggcgactggtgcaggagatattgttctttttgaggagcagtgcgaaaaatttcaaatggttaaaagagccaatgtgtgattggttcctgactactccttgctcattgcggagctacatgcaaaagcgtagcgcgtgattttctttcttgtgaactaaggcaggtctagattctggtggactcgcatagacaatggtaagtaccatctcactaagtgcccatcctgtggtcgaagggataactctctagtgacgtaagagatgtgcaatggggtcatcacggagaaccacgtgattgtcacactaaagtacaagttgagccaatcagctatatcggtggaatgaaaattgccagtggtttgtctgcactaacttagttttgggccaagaccaggcgaatgtgcgccaccatcccatagcacctaccattgtcttcccgcctcttgtaggggaaccttgtcgcatgggcacagttttaaatgtggaggaacccattctacatgagtttcataccctccctcaaagcctattatcagtttgccagatcgtcatgcctcaacacttggcactgtatcgctctaccatcattccgaagatggatacagaattagtccataaaatttttgcacgagacgaagccgaatctgctccgccctgttttacgggaaatgaatacgatggccggatgggactgaggatttcgtctatatttgtgatattggttggttcgattttcggcgccgtcttccccgtcgttgcaaggcgatttggtggttcaggaatcccatcctggacatttttcgttgccaaatacttcgggtctggtgtcattattgctaccgccttcattcacctccttggcccagctgaggaggctttaagaaacagttgtttgaccggtgctatcacagaatacagctgggttgaaggtataatcctaatgactatcgttgtcatgttcttcgtggagctgatggtcatgcgatacgcacggtttggccaaaacgatcagcgcgatgttgagaatcacatacattcacacttagacgacgatgaggatgccactactgatgagagaaatcgagtggtgccgagatatgataacttggaccgaccctggcggcatcaggatactgaaatgtccgaaaaaaccggtatggaagggtacatggctcagctgacttctatcttcatcttggaattcggtatcgtctttcactctgtgtttatcggtttgactctcgccgtatctggcgaagagttcacaacctctacattgtcatcgtcttccaccagacttttgaagggctaggtttgggctctcgccttgctacccttccttggccgcaatcaaaactcctgacaccgtatattctggggctcgtttatggagtttccactcctattgctattgccattggcttgggtgtgcgtaaaacttatccaccaaccggtcgaacaacgctgatcgttaatggtgttttcgactcgatatctggaggaatcctcatttacgttggtcttgtcgagcttatggcgcacgagttcatgttcaccccttctatgcgaagagctccgattcaaacggttctggcagcacttcttttgctctccagcggtgcggcgctcatggcattgcttggcaagtgggcgtaggtcgcgttcgatcctgtttattaacattttccggccttgactttgacgaaatgcaaactttcaaaagattctctgccgatcctgtttcccccagaacctggtgcgacccctcaagtagttggcagttgcgacgtcgcaacaccagggctcgtcgcaggagacccatgattactgtattgcgtcccatgagaagatgagctgtgttaatcatgttacgtggttcctttgataagggttatgtgcatggtgggatgtatgacgtgtgtccgcagcctggtccctcttcttttactgttcctctaagagtctcatggattatgcacggtaccgctttaagttgtcaagtcaaaggtctttccacgcgagaccaacctgaaatagtcaaaaatgaatggcataaggctcggactgaccttgccatgtctggctggtataagctggagactacgttacggcacttcaaagtggagctgggagtaaaaatgggccaatcaagtctctaggatcgactagagtccccagggctagtatgtgtacagcaaaaagagacatggaccacctcagtttggaaaaatgaggaaatactgatcccaaagacacttctgttgatcctggaatggccagtggttgctctaggagctttacgtagggttccaggagcaatatagctcccaggagaggtgatctatagacgaacttaacactcctgggaagctgacccccgatcctgggagctttcaaatcctcctaggtgtaaactcgtccatccccggacagaaagcttttgagggactctaataaagcttccgcgtgcctgggagccatgccatggatcctggggtcgaatatgatcccaggaacgtgaggggtctcacgacctaaaatgtgggctccggaatgggtaatcaatattaggaatacaaattgaaatacgggcaataagtgtgggcaactgaaagaagaggtggttaacccgttcttggggaccgagccagagcaatgacgtcaccgaaccttatcggtggcgatccgtggggctcggtgggactcaggaaccaaattagcctatatgccctcaagaatgcaagggcttaatattgaacaacacgaccgcatggtctactatgtcagctagccatatagggacggctctggtagagggtatatcaccgctaacgccggccaactcgaacactactaattcggaatataaccagttcgtgttgaagtcggcttgtcaaaagatgaggcatacaatccgttgtagctaggttacttggctgggctttaattaagcattagtgagtggtacttaacgatggaacgacatagccaatggatcgggggaatttttgaggcatatgataagaagctatttagctcaaactttttgaggttgatggatcttggggaagatgaagaaatggttgatccactagataagacatatctccgttcagaacattatacatacgtgctgatattcctcaattccaaagaaaagtgcggtctagagagtgggtaagaatacgggacaaaggatctttttcgctggaatcagcaacgaagaataagggcgtatatattgaaatataaggcatctaatgcagtgtatctacacaagcttcaagtgatggtaatgaagctcctttttttggatgtgagtggttatctcttcggcatttttgatatatttctgcgggctccctgattctactagtacactttgccatcaacctgctcaaaactgctgatactgtcagagaccaccaggaccaagcaaggcttgtccctataaatacctcgtagacgttggccctccaagtattttttatctaatgatcattgcaggtcgtgtcagcgaacgagtgtggtcgaagctggtcgtccaaagaaggagctctgatcgtgtcgaatttcgccattcctggccacgcgtaggtgagcgaaaggccatcaagcacagacatagtgttcttgcaacagaaatcttcagtagctgagaataatattcatcttctgggttgacttcgctgttgggatcacagaaaaagtaataaagcgtgctaggtgtatcacgggaacatggagtaggacacgggcaatcccattagtcacataggaatactcgagtccttctggatcatcacgcgatattcctggacaagagtggagcagacaagacgctccgcattgtacctcagcttcgcttcctggtctgtcgggattttgtcaaccagagataggagatccaaaacgtcttcgtgtgacgtgaggcagtgtgcttattttattggattagcaatacaattatgcatgataatgaagcatgaagcatttccggcccgcatccgcatgaatcagtcagaatttctatctattataattcttgatgcccgcttctccaacgcacctatatggcctctggtgatatacgattctatatgcattgacaaccacgaattgatcatccaattctggctctcgaacttgacttttgtgtgatgccatgaatcacatgaaaaccttaattcaactatgaagcttcaggaccgatattatggactgtcgtgtactaaccgaaaatattgcgataagcgcccaaccgctcgacaacctcgaggaacgagattgtccacatgactttcccaggtatgctattagacatacattccatcagcaggcctctctctgccaaactcctttgaaaatttctcatttgatttggcggctaacttcaagtattcgtaattcacctggttgacgtcagcctcagcgagagcgtgtgcaattgctgcgacgtttttgatctggttcatgattggtcagcaattgagatgttcagtgccactcggacacccacctctcgtccattcagagctaaagactccaatcgtcgaagttcgtgctcctcaacaatggcaggtccttgcatcgtacatgccttggacagaaaagttgaccagagatctctgcgaaactctctcgttaaattctcatactcaatgatcaagtgaatccggctgagaattgcgtcatcaaactggataccccgattggaagtcaagaaaagaattccttgataatattccagctttcggaggaaaatggtcacaaggcgattgtgggcatcgtggtaagatgtacgctgctccatgaacgcgtctgcctcatccaagagaagcacggcattaaagtgtttggcgatcttgaatactgtttcaagttgttgctcaagcgcattggaatccccgtggttgacaacaagttcgcctgcagatatctggaaaaatcagtgacgccaaaatcagccgagctggatggttcatacagaatagagggggagtttgaaatactccgaggttgcctcaaccgtgaaagtctttccgacacccggtgggccactaggacaagttaggttgggaagtcttgattcatagacgctttgccgacatacttcagaagaatgttgaatccttggccctttccatcaattacgtcgtcgaacggtaccgtcggtatcatccctaggcgggttttcgccaatgacaggaggatggtcttggtctctgaagggatcttcaggcaatcgaacgattcgggtgaccaatgcacgtccctaagagcactaactgcgcactccactggaatcacattagccggacaccaaaccatcgtcagtcgtgtcacatacagaacattttctccttgaaactgaaacagcaaactgttgggcaggcaaccagtaaatcggcctctctcagcttttgtgcatccacaccgtctcctcgcattttctccttctctcgctcacggccctccatgagcattgcaccaatgtcaaagactgcaattccatccttatccttgaccccaatgtcgcggagtgacggtcgggagtagtttggctgcatttcatggaaaaatgcggcgtccactgccactcgactcttgatgttgactttgatagccttccccttgttcataaagaatgcactgcctttacagtgccgaacgtgtgagccggctaaatcccgaaacttttgacccctctcgatcaggtctttccggacttgtttgtgattttgatagtgatggagagggaaggcctcaagagtctcgatcggctttgacccccgaaactttgcaacacgcagaaagattccggcttcgccaaacttgattccgtcataatcaaggaatcggcactccagattccaccacatctcatcattctgtgtgacctcttcccccgcgtcgaatacgacacatcgcggctcttttgtgccaatgcatctggtataaacatggcaaccaggcttgaaaagcgcccaaagaaggtcatatgtaatatgaccgtgctgcaacattgattcgagacgctgcgagatagccgcatatgcttgcttgaggtggtcgatgagcaaacagagatgctgtgccgctgtcgatctatggtccgaactgttgtccatgttctccgcgcgtctgtcgagctctgggaggaaatggaaaaggaaattttgctcgatctaaatctacgtcagcgtgctccttgatgataatactgtctcaattaccgatggcttgtcctccatcaggctaacggccttgatgtcgtgcagcacgtctcgcacgatgtcgcgtaggccttccgacttgatgtctatgaatggcactacctccttggacgtccggtctgatcatactattagtaggtcttcggtccggcatgcaaaggtgtcacgtaccaacacgttcacggacaacaaatgcatattcagcatagtcatccaggtcattgctagtctccgttggctcggcaatcttgtatttacatgcctcttcgtcccagctagacccgtgtcagctatctgaaaaagtggaaagggtggttggctggtggctcatacgtttccacaattgttttggattgggattttgatgcccatttctcaaaagacttgaaatcctccggtgtagtacggatcggattttcgagatcaatcccatctgccgcctgggcgttctctgcctgctcatcgctggaaaagcaaggccgagaaggctcagaaggctcatttgccacgggaggctcagctgaagaatatcctttgcggatgaccttcactaacaactgcttcagttgatccatatctgggcctggttgggaatggtcctggaagacaggagtgtttggaggttctcggttggtaagactgagcagcacactttcaaagagatgcttcagatcctccacggtatctcgaggcgtggtcgattccttcgttgggctatccggcggcgtcatgccttggtgacagggagacgaagtctttttcgatgccatgtgctctgaaagcaatcttgggctgctttgaacaggtgccatgctgtttgatggaatttgtttgtacgatggagaagaaagattgaatcaacacggtaaaagctgatatgaatgtaaacgaagaactcaataaggccgagaggttcctcccattttatatcttcgttgcccacccctgccccatgtgaaaccctttaacaactttaacaaaagtacgccgcagatcgcatgaacttggatgaacggtcttgaagggattgagttgcttgtgggagcaagcctatctctgccgtcccagacgggacggctaaggtggataggcacaaagaatctgcacgtctagtttcgagaatgcatgccttcaagactatgacgtaagaaagagatgcgaaatatcgtcgaataatcagcgatatttcgacgaaatttcgatgaatttatgcagtttaatcttatctcggatagagatttcagagggagtaaataattttacagagacttgggaaattattccaaggattctaatttattgttcttattatgttgatcttgaagagaagaaggcgaaaacttttggtctttaagctcaaagattattgtcattgttgcttgatcaggtcttgacaggagaccagcgcccaacccttcgggcaaagacctttgtcacgtgataatataaaggcggatttcttcctgcccctcacctgcccactcatctatttaccagcaatgcgctgcttgactcaaaggtgatacagccccaaatgacagtggtcattaatccttgacggaaaattcgtgttacttgaaaggaaatagctcaaaagcaacgtcgttggtgattatccttaatatcatcggactaagcggcgacgtaagtcaagcacgttcacttctcatctggcgtacgtgtaatgtattctaatatacaaaagcattcattctccccgggaagtttggattccaccagaaaagcgcacacagagaccagtaccatggataaggcagccaaaaaagttcgcaccgaaagctcatcagacagcgggattctcgaagaatgcaagaaagaagtgagaatgatatgttagatgttcatctgtgagaagaatactaattaccccaggtaacatgtgacttatgcgatcgaataaactggacgactccatcaaaaggtgttcagactacccctccaccgagaacggttgcaattgtcgtggatgttgttcagaacagaggcgctatacggattttccagaaagaaagcggtgaatacgttgacggagttggaaccgaggaggaaggctttcggatcatcattccatggagagacacttggcgcttcagagcatcgggcgtcgttgaagttgggtatataatagcaaaggatgcagattagtttggcggctggttccatgttgccaatggacggtgtaagattaatcgatccgtcagctcgttactgactggaattgtaacaaaagatgtcgtgttcactccatacgtgtcagtgagccatactgcgcctgatatctgaccagattctatgatatctcgaatatcttgcaagttgagctcatagacatctccggtcaaagggtctttaggtcgatttagctagttatcatccacttcgtgccaaggacatacctatgtcttgctgcttcccgggctgaaatgtcgacaaatccggcgatgtgactactgcaggtggtccttcgccatgttagctagtagcatgacccacaagatttaggtgttatactgaagatcggctgaacgatttggtagcttccttgaccccgctcctgatgctcgagagcgtcgtgagtctcggagacttgatggactgttccatcaccggcttgtaagggagcctggggagcttctgggtagagagcaaaactgaaatactgacgtgcaagccatcggagtacagggttgtcaaggtcagagtgattttggatctcatatggaagatcaagccgtatactctcctttgcgatggaaattgtcgaaagtcccaagccaatagcacaaagaacgaccatcgatgggccgttcagctgtcgaaccttgcggaggaagtcgagataagtcgactgtcggcctgctccgatggagtcctggggtgggtacccattcctcagtaatgtggcggctgccttgattcttttcctttctttttctttcacgccgttccgacgctcaacatatcttgaagcctggacaagcttctctaaggcactactaagagacagagtcatgcttcagaacaatgcaagtggagttttcgtcgaaaaggagcgaagagcgagtcgatgaaaagcgctaaataccacaaatcaatgtagcaaactcgagctttcgatgtcaaaaatcagtcgaaaatcagtcgaaaaggagacgaaaaggagacgaaagaccgctcttttaatagccttccccagtaaagtgggttgcagggctgtgctcttgtggatcgatgggacactagcgagtgcgtgcagctctcaccactcaggacacatacaacgccgtactcgtcattggttgatgctctttgctctgtcagcctagacacgctgaggcccgaaaaagtggggcagtcgtccaatttctggcttgagtgaaaagatcacagtaccttagtccaccaatcccacacgtgctaggaatacctcatctttcggctacgttagaaaaataggatggcgcgaggtgccacaattggatctcttctcccaccgacgtagccgctggtctagattgtgggtcaggcgccgagaaaaggctggccctgagacgcccatccgctaatgcatagtggtcacctcaaagcactggagcctctttcactaccctcagccaatcacggcatctgttgataggtgccgcagaagaaggtgctatgagcgactgagccattgtacaggggacacggtattcacatctcgtaggcagggatccccgctcgacctgtgcaaattcgtcctgggatgttcgtgatctaaggtataaatatcgcaggcaatagcgcaagggaagaagagcaccataaagagaggtcgagcagaacaagacagggcgggacaggacggaacggaacgtggtaaggtaacatgactctgcatcaccagcctcattggctaaaacccgctgagtgactatcatttttgtacaatcttcagatatctcccaaccagcgtagccgctgactgggtccagcgcccagcggccgccgctcgctcaccttgggggcgcaggacgcttcctctagagactccttataagtggcttgctaacatgtcacaggatcacgctaatgcatgggcggtcacttcatgctctggaacctcttgaattttgttgcggatctatctatctccagcttatcacacccaattcatgatatgcgccgccaagtcaggctcgagacactgaacatcgtgccgcacaaggatcatctcaagacatggtattcatgcatctgatacaagttcccccgcatctgaaaggaaaagtaaaagaaagaaagaccagcctgtggacacacatattccatcccacaacgttggcaagtaaatcttaaaagccacgaggactttaattttgggcatggctggctaaacctgcatctccaacttcaaacggctaataaacagtaaagtatctaatctattttggtttctctccattatttacgtctatgttgaaaatggcgcattggcgctctccaaaacaaaacccaaatgggcatggttttgattcgcggacgcccgtgcagaaacagcatgtaactaacaatgtggctcgaaaaaaaccttgctgccacgtcagtatagtttgattggatgggggctgccaggcaagtcacccttggtagttgagccttgcataatagcagcggcctcagacctgcacgcgcatctgatttgttaagcttaagcgccctactaaatcccttcagccccatttcttttgtagctggccgctgacttgtgatgtgatagctgcataaagaggtttatttcggaagattctctcacgtttataaaagctggctcctcgacagctttggtgaatcttactcccaactgcttttctcagcgaccacttgaactagccaacgtttcgtcaattctattcaacagagctgttgcaacaatttactatcgtgaataacaacacaaagcttcagtcgcaaggtaaatactcttccctgttctgtgagaaaacacctgttgacagcaaccagcaccatcaaccacatgccgaacaagtggaacaaaatcaaggacgccgtccttaaacatgcaaatggttacaaaaagctagtgcgaccaagtgttggtctccacaaaaccgctttcccgaagactgcggcagatctcgagagtctaggagtgcgcttcgacttcgcaggcactattgaggaaaatgggaagaaattccacagattccaggttcaggtaaattcgggtaacaagatcccaacttcctggaagcagtggagacaaaaacacgaaaaagggacacacggaatcgttgcaactgtcaaaatccccgacgatggcactaaggaagatgtccaggcggctcttgacgctgtcgatagtgagatcgactagatagactcccccttctcagaggcctaagacatgtcgagttcgcgcatcccggtgatgaggccacttttgtatctaatctgtgctcagtcagcatccgaggccatttacctcaggatctacccatagcacttacagtggtgttccatgagtatttgaccttgggtacttcgggccccgtcactttagacaacctactatgtttaaatacgaagttgggcattaccagctattaaaattggattgaatttccgtttctgcgaggcaatatttgaagtgggcctaagaaatggaccctagaccgaagtacccaagttcaaatactgtatctgtcgctttgcgattggccgaatgggaagaatcctaacatttaccgacagggtcacgtttgtgctgagtaatacgcatgttagccagaattcggctacgtaaccttggaagtaccctagtgcaaataataatagcagcttgggagcaatcttggaactgacaaccatctgcttgaagatgcgacgcttttcgagattttttattccatactcgaagtcgttacccaggaggatgtcctctatgcgtggtaagcctgatctgttcgagtacacttctgggcgctttttgtgagtcgtgacggcggttagctgttgaacgcgtcaattgcgataaactgacttgatgcgtcaaatagatttaacgaagagctccgccgcgctgaacgccgtattcaattcgacgtggatgctcttgcaagggcggcctgccgttctgtcggtcgacatgtcaaggacgtggcctcgatcacaaaactcgcggaggggggcttcaaccgtgtcttgcaagtcaccttcgatgacggatatgcagttcttgcaagactaccgtacaagacgactgtcccgaaacatcatgcagtggccagtgaggctgctacactcgcacttctgcgtgctcatggggtcccagtcccaaaagtcctcgcgtattctccagatcagacaaacgccgttggaaccgaatatattctacttgaaaggctcgaaggatcacccttgagtgaccagtggttctccatggataccaaaactcgggtcaaagtaatgagacagattgttgatttggagagacgattcatgagcatccacttcccagcaagcggaagtctttatcaccgccgtgatctcgacggctcacaacactttatcccagtctcggacgatatcgtcgttggcccaactgcacagcatgaatggtggtatcgagaacgggcctctctaaaggttgaccgcggcccatgtaagtattcatccaggagtgcgtgttttctttggggatattgactctgagccagggaataccttttctgcatgcttcgaagcacccgccaagcgcgagatagaattctgtgaaagatttggcaaaccacgcctacacgtcgagagatacctacgagaaatacaccagttccaaaagctctcacctattccgtaccaacgtcttcttaccaattatttagagttagcgccctacctcgacgtcccatccggccaccgcatgtctcgcccgactcttcgccatccggacttttcacccaacaatatcctaatgaatacgtccaacgacgtggtagggatcattgactggcagcacgcagtcattctacccctctgtctgtgcgctggaatccccgatcattttcaaaattggggcgatccattgtccgagacattatctaagccagaggtcaaattgccagaaaattttgatagactcagcaatgaagaacaaggaactgttcaagagacgatgcggagacggattgtccatttctattatgctgcgttgaccatgaaatccctgccggatcattttgacgccatcagaaccgaaaactgtatgctccgagcgaagctttttcatcatgtacaggctccctgggaaggggactctgtctcgttgaagtatgccatgttacaggtcctcaagaattggcctatgtcgctggatggaggagcacaaacgagatctgttgagtgtccaattcaattttctggggaagagatgcagaaatgttcggaggatcatcgccaagaacaagagaaactacaggaactgggcgagatgagagatctaatcgggacagatgccctaggctgggtttcagacgaggatgagtttgaacggtgcaggggtatcatccagagcatcaaagacggtttgatggaacattcaagcactgagatggagaaaattgcggtcctttcccatttccctttcgatgaccacgaagaaacagaaatgttcggaggatcatcgccaagaacaagagaaactacaggaactgggcgagatgagagatctaatcgggacagatgccctaggctgggtttcagacgaggatgagtttgaacggtgcaggggtatcatccagagcatcaaagacggtttgatggaacattcaagcactgagatggagaaaattgcggtcctttcccattttcctttcgatgaccacgaagaaaatgcgtgataacttcagatctcgatcttggtagataatatttattcatatatagcttacggacatctgaagatagcttgtcccgaatttgagcaacagatgatcttccacggcgattcgctcgtagttctcgagaccttgttctctactaatcgggaccccaatacctttgatggctacctctttgtggatcccacgactggggcctgcaatataagcagcacggtcacacccaccgaaaagtggctgccatttgccatcggagcctcgacatgccctggacgtcttgctgaaacaagaattacccaggtcatgttcgccaagatcctatacggcttcgacgcaaacttggagggcgtcgatgcgcaattatttctacattacgacgggacttgtggggctacagtgatctttgcttgaatagaggtatcgacaaaaaaatcgattaactattgtttctgctactcaggcattatttaatatgtggattgggagtgacggtgcgtaagtcaaggcgcagtggccggtggggcgagagtgaaatcaagggggcagctttgagtgcgaagtagatcggacggagagagcgaagaaaaggaaaagaggtgggagaggcaaggtcggctcttttatgttggagcaaagttgagaggtcatgtacgtgacagtatggcagtcgatagtggcaaaactaaccggatagtgttattcgtgaattacaggtccgtcgtttacaagactcacattatagccgaaaacagtgtcgccaatagcaaaaagtgagattaaaactgtgtttcagtgccagagcggcttagcgactctgcagggagaccattgccgctcttcgaaactgtgaaacctggtaaggtttaactgttgcccaacgcactacgggcgctggacccagcgtgacggtcttgtttttggcgatccgtttgactgatattcgacaaagactaataactactgccaactcaaacaggggaatagcggtccaccgtttgcctgcgccgaggtggaccgtatcgcggtcttgacacaccttcttcggtgcctttgctcttgccacccgcggcttgaactgcctcgcaaggtgcgcctctatatgaagattcgctcctcacgttggaactccgccgagaatgcccagaatttccagccttgtggcccttgaggcgtgtgcaatagcgcacctggagggagccttccgaccttccaggaaaatactctgcgattcgcttccatggcaggctccgctcttccttcaattcaatcaaaagctggtcatccttagacaggaatcgggttggccctgtcgttttcccagcgcgggaccccttctgggaggtttgcttggaatgctggctgccaattttgtttttatattgtgatgtagctctgcctgatctctgagagcaggaatgctctgcctgctcttcaaaggtaactgaatagatgacccttgacaaaagtatctgtcgcgtaaggaaacctcggataggaatcgtttcgatatcgtgcaagcttgttagggaagtatgatctgcggccactttggattgaactgcctcgtcgaccgagaggcgtttagtgttctgccggggaggtctagtattgagctgcatggtaggttgtcttgctctttttagccgacgggaaggaacgctgcttccatgtgcatcttcaccactttcgcccacgtagtccgcatcgtcggggccatcaggatcgtcgctgctgtcatcggatatatactcatcccggtcccgctttctgttcggagaggccattcgtgttattgaggcagagtccttcattgttcgctcttggggacggaagttggagatgacgacggacggctggtctaacactggggcatgatctaacactggacagaatcctgtaccttccactgttgggctgcatggcgactgcttcccactgtcttgaaatgcgggtgaggttgaacgcgccaatgttccattttgacgaggttttggagacgctgacaggctctccgcatcacgacgctgtagctcgccttcgttgtcatgagctgcagccctgtctttctcctggccaataaccacatggctttcggaaacgggctgtctgttgtacttctcggctggcatgcttttcccgatgacgcaagctgccagtttcgatcctgattcgtctgcttcaattccagcatctccagacagcaaatgcgttggagtggattgattttcttggcccgcagggtcaataatttggccattgaccattgtattgccgtctgctatatctattgtcgggttcgaaggtcgcaaaatgtctccttccatcgtggattcgtctgcattctaccacgtgagccagaggacagggcaacctagctgactgagagcactgacctgcattttcatatgcttctgcttggcttagaatttcttcctccgccatggggatgcagaggccatcacggaccgatgtagagtatagaggagtggattgctcaagacctcccccctggataatatcttgagaagaagatgtcacgttgttctcatggtgcccgtcaccttggaagtctgggtctcaaagtgcgaagtcagccctctattgtcgaccactttggcattaaggaaaaagagataggcacaatgaattcaacagagtgaattgaagaaattaaggggactcaaaatgacggccaccacgtaccatcgtgacgctgatcgtataaaccttgccctaaaccactgctggaaacatcatccggcaattctcgactcgccgtgtgtatatttgatacagcaacgtttgcatctcttcccgaagaggcattcaagaaatccatgtcaaactcattcgagcagtcaatggtcacttcttccgcaagctcgttgggggctaataacgtctcgtcttcactagatgcatggaaatgactttggaagtacggcgcatgccccgagaatggaacactcgaacgccagtgctggctgggtagaaacggataggctggcgggggtctatccgaaggtatctgtgaattgatacgatcgtgggacccgggtgcccggagcggattgatcggtgccatgccgcgagaaagattcagacgcaatgtatgagaatagaagagaaggaaccataaacagatagccagcctccttctcggtcccagtgaggagttccaacaaccctttatacttgcctaccgtcccctgcctcttccgagcgctttgggcaggtcgaatggacaagagtcatgagacaaagcgcagcctgccgatacgaggacccaccaacccatccgcaatggaattcacaaaggagtcacgcgcaaggccgacactgcatgcggcatttctcccattggatcaaagcgtttcatgctcggataagttcacggtctgccctactgcgcctcgccagaagaggatcatggcgaagggatcgtctccgaagggctgcttgcgtgggcatcagcgtccagtcgggtgagacatcatgcgcacggcggtgccgaccctctcaggaacttccgatagtccaggggcctcgatcccctttgctgtgcctcgccggaacagtacaattgcggcaagatcgtccacggaagatcacttggcgcagacactggcgcccagtcaaatgataatccatcatctgtaaagtaacgctggcatgttcaaggccaccaaaagtcgaagccctcacgaaaagaatcggggaatgagacattcttcgtcataggctctagacggtggataggtggggcgtaagagcagcaaatgccaatggatgcatatgtgtggcgagaactcgtgatcagcactagatcagagagcgccacgtcacaatcgtgctcgactgaccagccggtcgatcgaatctcctcgcaagtcaaggttcccttcccgggccagtcgtagatggctacgacgctacagcgggcaaaacaaacacataccagtgaaacagggaccagagggtaggcatgttggctgccgcccaagtgaggtcacagggttgcagtgcagtggtacaatctgagcatcagggcgaccaggagaccgatgaatggatccatctacagccagtcgagtggagaaagggcgcgcaggcgattacgaggaactcagctgaaacatggaggcgcaggggggagtatgccgtgcgatccggaattacggtatcatttcaccgctgggtatgacgggagagagaagagtgcagtcagtcaaagagcggaggacggtggagcgacgcactggaagttatatagtccaaaaggtgaagctggcaggcggtcggagatggcagatccccgtttagggatagccggggccgccaaactgcttcgggaactgctaaaccaaatcagagtccactaaaccagaacaggagcgggttgtgcctttgccatttcaggaaaagcgtagacgccaaaccaaagtgggatagaccaaacccaaacgggggcagtggaggcagacgccaaacccgatccaggggggcgccgaatccggccgcgtcggcacatatggtatttgtaccttatagactcctagggtttagggtagagtagtatcttacctataagggcttccttagcctccttttatatcataagtatatatagggagctattagtatcttctatacctaatcctatagctagataggtaacttcttatagttcctctactctttagtagatagcttctttaagcttatatataaaccttacctagtgctatttattatatatagaggtttatatatagtctagcctcctacttagtatatcggctaggtttgtagagctagttctaaatataatagtgaagttaaaacttactatatacttagcctatcttacttatctgtaaggtagctccttcgttattataaagttcgttaagtttatataatctatcttaactaagacctagtatatatttcctttaaggaaatgtctctattcttagaaagcttctataattactagtatctcttggtttcctactctatagtaggtttcttccagccttatcttatataagaagaatataattggtttctaaataccgctctctttttatagctataagtagattactctaattacttcgcctaatatattagattctactaaggttcttagtagggggtcgaagtatataaggagaggggctttttaaaaaatctccttaatctcttagaaagccttctttatagctttattaaagtagaagcctagcttctttttattcttccctttcttctatatatctaggccctagactaatatattgagcggccctataatctttaagtataatttaataaacctatagtaaaagtttgcgaaacctataaattactatatatcgaagatatactctagttccggctaagtagtaatcgcttctacttagataaggtctatagagatactattgctaaagataataaatctaaggaactctacctaagaagtatagaaggtatacttcgaggcctttatatagagtttaaactagtagagccgttctaatactatttatatatattctacgtaggattccttatcctaagagaagattaggatattatctaggtagactactaagaagatatctagtaatcctataagagccttatttatataagcttagaaggttataggtatatttgtaagcctaaacggtattatataatactcgaaatatctatagtaggttctaaataccgttttttatttattacccttcttaatatagatcctatagtatatatctctaaggtctagcttagtatagacctttatactagtgagtctcgatagggattcgctaattaaaggtagggggtagcggttcttaatagtaattatatttaatctatagaagtctatatatagccgaagtttactatctttctttagtataaaaagaataggtacccctatagggctctttgaatattagatctagcccctcttaaggttcttgttaatataggtatatatagacatcggcaaagcccagcatgggcccaagatttcggcccacggcccaacccatatgggctatgggcctagctcccctaggcctagcccagcccatagcccagtaggctaagcccataagcccactagtagcccatttaggcctatttttatataaataataggtcttagtgtatataaaaatgcttacttagtagaatagtatactattacttacatgtgttttagtttcttaattgaaagacagccttttatgtcctagtagccttgaaattttagtttttatttatgaaataatttttaatatggccggtcacttattatttctagaaagaataaaaaaataaggccggtttagtgatactttatagataggctggtctctatatagaaatatatattatagtatagctagtaatgtaggtatactaggtatattatagtgaattataatacctatgcgaccgaatcctttgacctaaatactgattctagaaagaataaaaaaataaggctggtttagtaatactttatagataggctagtctctatatagaaatatatattatagtatagctagtaatataggtatactaggtatattatagtgaattataatacctatataaccgaatcctttaacctaaatactaattaaagactattaggagaattaagagatatctaatcctataatataatttaaaaatagtacctaaaagaagaggggggccttataaggctaagaaggtatcttaatcctattaagtatataccttttaaaattaaacttcttttatttttttctattcttaatagtatatattttagatttagagtatattctttactctataaagctacctactaattttaaagggctaatatatatttctttatatatcctattctatagttagctatagtatatagtctaatctatatactaaatatagttattttaggataaaagggtatataggcgctgctatagagaatataaattatatttaaaattctttaggctacagcctacttataatcaattctagaaaatataaactaatacagagactagtatataggctaatacagagactagtatataggctaatatagagactagtatatagactctattatcgatagaggaggtactctatatactacggcagagggagggggctgaggcctataggctagtagttaaggttcttaagagcctggttaagaggaaagagttaactaagtattagatttatatatttctagattatatcactgagtaggagctatagaaaggataggaagactacgctaatttttaataacagtagattagtgtaattaaggttcagcagtatattcaaaagaattaggagtatatcgataaagtacactaaaaggcgactgcgctatagggtatacgagacactaaggccttctttagatacattatattaaagtcaacagctaagctagctagcaaattgatcacagtaaaaatgaactaccaggatataaggcttactattaataacgaggttacctaacgcgtttcttcctctaggagtagggtccagaagaattgtaagtatattaagctgatcgatatatagtaggcctattctaggctatacagtaagtcgataatcctactctgtataaaggatctccgagattatggtctttagcttaatactaataggttctgttatacagctaggagtagaagggatcttaaagaggttagcgatatatcgatcggtaggggtagtagctagtagccagttctactactaccgctaagtaccctaagattcgatataagtaaggcttaataaagagaaggagggggtaggtaggataggcccctagctattctactaagtaataatactatagctatcctactaagtaataatactgtggcagtagtaacgataagccagcctactaataggacatatagctaccgcgtagcagagataataatagataagtatacaataattgcgaaagatagtatatagaaagagagggaggccctagttacctttataaaaattgtgaaactagtcgaaagaaggttcggtaccagttacatctatttcaaatacactaaagggattatcgatatactaggtatacgaagcggtggtaagagcccttaggagctagtagagcgaatctaactcagttactacaatcttagtcaataggataagtttcggaagaagttctctatctagtttatactaggcgcagatcccagaaacctaaaggaaatacatagtgtctactaattcaatccgaaacccatacccccggtagtcgtatcatttaatactatatactagcttttatttaagagtatttatagaagggttatacctagataccaatttcagcctaatattatctatacctaaataactatagatagcagtatagtactactatagctacttaggtagctaaaagaggactttaatagtgcctaccctagtggaattctatcactaatctactaagaattcgatatatataagcactatttcagtgagcgttatgggcgccgccttagctagctacggagtatatagtatagcctagtatagtaactaatctaataagacctagtgtactatacctattatatattctttcggctggactactaatagaaattaattgtatttctatactatataaagagtacgctacctagtaagagaatatcattctaatatattgatattaatattagggagtttatcgctactagtaagggcagtaatatcctatagggattagtctcccttaataacgaagataacggtaattatactattattctactaggaatataatactacattgcttcttagtagaacaatctacaaacctatatagaggacccagaaaacctatctagccgaaagccatttaaggtccctaatagctttatctataggattaccctaaagatatggtaactagaggatgtggcttagtaccgaataaactggaaaaagtaagtctataaggtaggtaacgtctacctatcccttcctacccttccttacagcttaataggactagtaactagatagaggaagactgtcttactatagtttataggtattagggataattacttaatactcgatatacctaagtctgggtcctaggaggaggtattagctgtatatagagaccttcttaacgctactaggataccctctagactaataagtcggtaatatatatatatcctatatacctttcccgctactacctacttctatactacctctactattttagaatgcctagtagggcggtctaagtagataatactagctgctataaaggaccttaatatactctttaggcctaataaggccgctgcagtaatatatatttagaattagaggcgagaggcatagctagagtacactcgcctatttaagttgaccgttaaggctgaaaaggatgcctataggaaggacttattcttttagagacataagaggcgccttcttaatagtagtgataccagcagtggtaatactaatagtagtaatactaatagtagtaatactactaatagcggtaatactactgatagcggtaatactgctaatagcggtaatactaatagtggtgatactgatggcggtgatactgatagtagtaatagtgatagtagcgataattggcctaacgacaacgtcggcgtcgatattaagataggcgaaggggagggggagggcagtaaggctgatagagaatttaaggaggttaataattgaggctgtattagcaaatttcaatgggtactagatatatcttttttttatagataaatacaactataataatttcttttataataatacttctaccttgccgctactactcccagtttnnnnnnnnnnnnnnnnnnnnnnnnnnnnnnnnnnnnnnnnnnnnnnnnnnnnnnnnnnnnnnnnnnnnnnnnnnnnnnnnnnnnnnnnnnnnnnnnnnnnnnnnnnnnnnnnnnnnnnnnnnnnnnnnnnnnnnnnnnnnnnnnnnnnnnnnnnnnnnnnnnnnnnnnnnnnnnnnnnnnnnnnnnnnnnnnnnnnnnnnnnnnnnnnnnnnnnnnnnnnnnnnnnnnnnnnnnnnnnnnnnnnnnnnnnnnnnnnnnnnnnnnnnnnnnnnnnnnnnnnnnnnnnnnnnnnnnnnnnnnnnnnnnnnnnnnnnnnnnnnnnnnnnnnnnnnnnnnnnnnnnnnnnnnnnnnnnnnnnnnnnnnnnnnnnnnnnnnnnnnnnnnnnnnnnnnnnnnnnnnnnnnnnnnnnnnnnnnnnnnnnnnnnnnnnnnnnnnnnnnnnnnnnnnnnnnnnnnnnnnnnnnnnnnnnnnnnnnnnnnnnnnnnnnnnnnnnnnnnnnnnnnnnnnnnnnnnnnnnnnnnnnnnnnnnnnnnnnnnnnnnnnnnnnnnnnnnnnnnnnnnnnnnnnnnnnnnnnnnnnnnnnnnnnnnnnnnnnnnnnnnnnnnnnnnnnnnnnnnnnnnnnnnnnnnnnnnnnnnnnnnnnnnnnnnnnnnnnnnnnnnnnnnnnnnnnnnnnnnnnnnnnnnnnnnnnnnnnnnnnnnnnnnnnnnnnnnnnnnnnnnnnnnnnnnnnnnnnnnnnnnnnnnnnnnnnnnnnnnnnnnnnnnnnnnnnnnnnnnnnnnnnnnnnnnnnnnnnnnnnnnnnnnnnnnnnnnnnnnnnnnnnnnnnnnnnnnnnnnnnnnnnnnnnnnnnnnnnnnnnnnnnnnnnnnnnnnnnnnnnnnnnnnnnnnnnnaaatttattttttgtttttcggggaaaaaacctcttagcctaaaaagtagtttactttcatacttctgcttcgctactactacttaaagtttttcgcccaaaaaactagttactggttttttaggcgaaaaactcttaacctaaaaagtagtatatatattcttatgatttctattaggcccctagctagtaagacccgcgtagataagtttttttcttagatcgtgggtccctcagcctttttaggattcttagcctatattatgtagcctacgcgtctctatctaaattaggctaagtaaccagctaatagggtaactagttaatcttcaatcttccttatctagttacaatagaattagtcttttattatatatacctatccttcctatttatatatactctatatcgccccccttactgctctatccccttataccgcccccctactttctaccgccatactaggtaccatgtcccaaagtacctaatctaataggaatatagatataacctatagtataggctatatcccctcctctctctagacctcttaggcagagtcctcttatgccctgtcctcctttagcctactacctagtagataagctaggccctttaacactgagcccaatcgccctataatccctagagaccccctatcctgctttacccacgttagccctaaccagagaaaggactacgtcctatatgataaaatagcaaataagatataggttgaatagtagctataaatagactatagatagaaaggtagtatccgctaggatataaatcacagctcccctatatagtaagacttctactaggttacctatagcagagataggataccgaaggtttagtgcaagttctgccacagtattttagaatacccgaactttctgagtaatagaaagggctataacggcttattaactatattaaggtacctaaagacataggcctaccttagggcccaaaacacaataagagtaggaagaggaattagccaattttttctaaaagaagtatatttttaactatctaatccttagctattactaatatatctgggtcgataggaccgtataccccctaaggcctaatattcagaggctgcctaggataaggccctactctgatttattactatagatcgactacccttctcccttattaagagtaagtcctttcggtatctcttctaaatggcctacgtagcactatccctcccctagataccttctactataataatatattagcgcctatgcgattatatttaagagagcgtaagcttagtacttaggacactacctaaggatacaaaaatcttaattatattagactgctagacgtccctatataactagggatttatagtaattaccggctactttatcaatagtagctaggtatatcgcaaggttctacttaggtttaagccactttaccaggtatatactagaaagtatcttagtactatccttcttaaaaccctggctaagtataagattatagaccaggtattcagaatcacaactaataatacttctaataatataatactagttaaagctacctagatagggctcctaagcggtatataggtattccgaataccctaccttacctatattatctagctctctcttaactagctcctagattgcctataggctatactaaaaaataatattattaagttagtttagactgataagaattcaaagaatataaaagaaaatggtaattatcagaaataagcaatctcgaagatactaaaaaagatctataatcttaccctctatatctatattagcctaaagcactaggctaccttcctctaactataagaagggaaggggccgcatattattctaatctaggatatagtaacccggtggaactcaacctttttaatactttactagataaagagaatatacctattctttatatccttctgtactaattataattataaggagatacttcctagtgatttagaatggtattaaattgactaccttctacaaatcacccggcctttctatgactatataacagaactcttaaagataaaggaagtgactacctaccttacctttaagatttataatgccctctttaattacttcgactaggtagaggtactactaaaacagaagtgtgctctgtggaagttagaaatactaagtacacttattattagccacgaaaagctgagtgagtactatatataaacgaccggttgtaaaggagacctctttactattaggataatactggcccctgatagttaactttaattcttctggttggatggctactaggagcctaagtagtatgataaatatcggaaatccttcctagatatattagcgccttatcgagaacgccttactttaggctaggggtcagctaatatactagctataataccagctagctctaggctacgtaagttactaaagagtaggtagaagtctataagaccagctgttaataaggtaacctagtaccttaatagtagtatactataccttagtctcccctactattttactatactatactaactactctctacctttagaccttattaatactaagcctctgcagttctagtaagagaataaaactcgttttcctataattgtataacttacccgcgatatcctcttaatactagtaactagggctagtattaagcgactctttaatactgtataggatatttactattatcgctgcggttgcctaaagtctgagacaattaaggagcttatactataccgctatataactaagttcagtattaaggatactaagataaaggaattgtagcagttacttagtctagtagaggctgaggttaagaataaggagagtactgactttctagaggatagtaagtgtaatctaattagtgataataaggaggaggagggaggggaaggcgatagggcgtaggaggcatctccttcctccttaaccagtagggataggggcagtaatagcgatagtgagatagagggggtttagctagatttgccagagcctactactctatttcgtgtatcttagaggaagcgtaagagtagggtcgacgatgattatatatattattagaatatattaatggtactgtcttcttaatttttactcccttctttgaattttcctggtattccggctgtaactaggatacataataatacgggtcggaaatatattagttatgtatccatgcgctagaggcctatttgtattatataaggcctatatgggcccctattatgggctataggcctaggatatcagcctataatttagtgtaggccgaagaagtcagcctaaagcccagcctattggtaggctgggctgggctgggctatgggccgggtaggctttgccgatgtctaggtatataggacttctaactctatgttcgatagtaagtatagtgacctaaacgggggtacctttcctagctctaggtcgatagtataattgtatataatatattctagtaggattgaagctagagccttattaaagatatctacaaagtctctatatacttgcggtaaagggttgtctatctatatagctcctaaccgttcgccttcttctaatagatctagtggtctaatataaagtatataaaagatactatatagatacagttctttcttaaactcttctggggagactatctctatttctagcggggtacccttatagtataactaacggctagcgctctagtcgatatctagatttactatatagagctagtctatccctaggactatattatatcccgatatatcgatagccttatagtatatctttataatactatatcttctagtactatctataagctagagagcaatctcttagctactatataagtagattttatgcctatcaattgcctttactagatagggtatcccttttatatcttctagattctccttcgcctatctttagctaataaaggtctaggtagccttactattaattagaattctagtaacccctatcggggcgcccttataaatatctaagataaatatattatatactaatatactttagcccttctgctaaccctccttaagggttattcctagtaccgctatagcctatagtatagggttatctatttttttagctcctttaagttattcttctagaactacttagcttttaggtaaaccctcgcgatatatctagcttccttatataagtaatataagtcccttacctagttatctaattttaccccctagcctcgcttcctcttattagaggataatgactagccttatttcctcttattagaggataataactactccttttagctatcctataaggtagatagttcctagccttagtctaataacttcttactattatcctttaagtctatattcctattctacctatataggtatcgcttaacctatagctttatagtatataaaggtatttagctctctataaagctaagataggctacctaattattatagatctttattttaggtaggtcctactattaggcttcggtttagatctctcttaaaatacctatctctaggcagtcgatatatacctaatctaatagtatagagtgtaagtggttatagatccctattaggtattaggtatattaatatatactctattccagcttctatatagcttactattaatcggcttttactttatactataactatactaggtctataacttaggttaaggcctaagtttcgaatatatcctatataatctactttataggattattctttcggtattatatctaaccctaggtaaccttattcgagaggaattccgttacctgtataacccttactttatctaaggcgaactatcgtaggtatctcgcctaaaatacttcttattttaccttaaatatatcctacttatctatagttttactatagaatactggtatattagataggcttcgcggctccctaacttaggagattttactgctttatactatacctacattattatcgcggtcccctactaccgttaggggaggttagggtatcgccggtatccttaatatagggtttaggggttctggtacctaggcaatatctcccttaagtagtggtaggcgtagtatactcgattcctcctctaaggtaatggccgcgaggttccggtcgcgaaggtatagtaagagttcggctttctagtcagtaattataagccgttttttaagggccttaaggtctcgctattcggctataagccttctttcgttttctccgatatcctcgtcggaggattctatcggttaggcggccccctcttctacaggagcggctctttcagtaggtatggcccctatctcagtaggggtttgtaaatcctgcgtttagttttcttggccggtaggtaggggtatgtctccctgtaatacccggcttctactataggtatttcgaggtatcttataggttccagcggtccaattcgtgaaataaagcgattagaatattaggactagctaccagcgtatcctgaaaatagaggttcgaattagagtggaggtccccagcgtgggtcatataattcagtagactaatcgctaaggttctaaatctcatgtgcgcggtgtgtgtatacccctggcgcttacttagcaagtacgtcggcctatacgggccagttgtgcaagtgaccctcggggtcgtaacatttaccttgtgaggccatcatggttcgggcaggtgcgattatggcaagaaagaccttgatgtctgcggtcatgttgagtgcagggaactgcgaacccgcgatgtatctgaagttggataaacagagacacctttttttctagatatatttctacatgtttatatctcaagattcgccaatttggcccagaactaaaatgtatgactcaagtgaaataaatggtcagatttctgttcatcaaaacccagaccatctgatctgcaccgcagagactccaattctgcattgctcgaggccaatttggcatatcatgcagcatatagcacagatgagagcctgcctattcaaagacacaagcaaatcgaaaggaccatatccggagcaattcatgttctttgggagtctcccctgacagcttccattcgcgccaatatgccacacaatgatataccgggctttgacagaactgatagttgctgcgaagacaggcggtctcgagatgtttgataccctacatgctgctggagcagatgagtctaatggtgcagaaatcatcgttgggtgatgagcaggtccaaattcaatgagcggactactcagtatccgctctctctacctctttgcctgttcatggagccatcgaggctggcaatcaacctatgatacagtatccccgaactatcctcctcacacggctacaacctttagtcgcctaccgctatcgtatgccatcgcccgttacgattcaaccaatgctagcgtgtaacggtatctagtagatttaccatcttaccgtcagcttaaccctaatctgcgcacgccatcttctatatatacatcataatctagatcttctttcctggctggtaactttcatcccggtagggttggtggtgcaggaacaacggctctaggatataaactaccttgcgttgcttcgctgcctctcactggcaatcaaattgtagcttacgatccagttattgcaaatagtatatactacccttgaatctagatggcttccccgtggaatgccaagtccgctaaatatacaaaactagagggtaagggcctaagaaaactgtagtcactgacggaatcccagcaacagacgcaaaatgcgactatttggcttttattgcaatggtgagtaatgataccagagcaaatgatatagacggtaatactgctttgaattatggctaggactggtaacgtcagtgagtattgggatggctcgacaaatagattgagcgaggaagcctggcagaatgcgacaaactgctatgggtagtatagaaaagccaggtttcacagcaaatcaggtgagctttatatcctaggcagtagcacccaattaggaaatactctccgcgataagtccttatcgctttccaaggttctccttaggcactaaactacaaacagaaatgacgtttctgccactcccggccgcccggggaaacgagaatctcaggtgtcaagtccagattgagagcgtcatccactcaatctactttattccgcgagtccctatatgatttgaccctcccagaaacccctcaattcaaatcctagacattgaaaaacacccccattccaatatccctccagcctcgagctccgggacgcaatggcacccccgcgccagcgcaccacagctatcgtggatgactcgaggtccgaagcctcgagtggtacgagagaataccacaaagccaccaaatcccgcaggccagctgcggcaaaagagaaagcctcggtcaccagcgcgcccatcgtggaacaccagaacaccgaagaacagccccgagtatgtttcattctgaaagcaacgatcaatcgcaactctacacaaagcacagcgaagagaccataacctaatcccccttttacctctacagctcccctggacagatctacccctcgaaatgctccactcctaccgccacgtccataaactccccacaccctccgccttttcgagcgactactcccgcatgatcctctcgcaaggcgtcggccttcgctccccaaccaccctcgctgcccgccgcgctcaatccttatcccaaaaccactcccaccgaaccaacacctcgtcggactccgtctccgactccacgctgcgccgcaccgccggccaggaccgcgtgagcaaagaccagttcgcgcttgttgtcaggaagcacttcaacagcgctggtctctcggagcaggaaacgattgcgcggtttctgtacactgtgcgtgaggacaggagagggaggcagttccgattgcggtttcagccgtaaggtgaggagtctagctttggtctcttgctcttctcgtttctttcccctttctcgcaggggaaatgggattatacagggctttggacagagctagggctcttctgcttcttatcccaccgttctggtgctagcctgtcctggttgatggtgcgcttggttcggtgcggtgaacatacatggcgtgtgtggcttattgggctgccttgctttgagaatctggcggccttttctcttttgatatattaagatacccattggcgttccgtgtgtttatcttgttctatctctacttcttggtttgcgggttgcggactattccttccactatgtaactatactttacttgacttatacttttgcctataggaattctacgtcattaaatcggcgcagaaaatactactcgaggaagagtagcgacagcttcaagcgttaaatgacttactagtaagcgatagcgagatccttccacagctctgcaataaacaagtatcagtaatatgggaccgcaaacgagcagtttagcctctttgtaacggtgttgtttcagccttggaagcgagcgatctttaagcctactctatcgataagcctgagccttgattgagtctccagatggtatgagtaggaataatgatatttgatcttctgctagctatttgcgctatctcctaaggattagctagcgttagagaaggcctatactgctggtgagcattcgttgaatttggtgacgggggccaacggtgcacggctgttgacacatccaacgtattcgataacttcgcatatgactatgtattcccctagttagtctgattcgtacatctacttcgatatcgatctgtgaggggttcgtcatataaacataggcagatggatttccttatagtttgggagccccctcgagactggcaagaattagtcttagcatatcatcaatacattgtgttccttccacaaagtcctctgtatcttacccggttgacaggccttacacctgcataacgtatacctttacaatagagtgctataaagaagatatagctagttacttcgagggatagttcgcttactaagagagacctaaaaacgatataactaactaaagggattttcgtaattgagacagaggcacttgtccgatatctatactatcaatattttagcttaatgtcatgaaatctttattccttcgcgatagctccgccaaggcgtagtatgctttatttaggtcggcttataaggccatatattaccgatagctatagaactactagataagactaggagtcttattgaaggcttctagagttataggggaggttgcattataggagcgccagagtccgcctacgccacagaaggtaggtaagcctgacgctgctaagattccagctctaagcagagtaacgatacgtttgcagcctcctaaatattccgtaaatgattgaaggtcagcggccggtataatgctcttttcggataaagccatggtcttcaagtcataatatggacgttgaagagctgagcttatcaagggcgaagatgaaagtagggatacggggaatttataacttactgaatgaggcctgatctgtaagacatcgaaaatatgtcggctcaaccgtttctgtacaacataggtccaatcaatggagtactggctcagctagcaatttatagagcctgattacatgaattaaaataaacaatagttacacattattaggattaatagatcctccggtatgctgtgcattttacagtcgcgaaaccgtattaaatggtcggtgtattgaaaatggagtgccaagattgacctataccaattaggttagactgctgtgccaacggtcattgcagtcattacccagtcattacccatcgactcgactataccgttgcccgcaaaatggcatctgctcgcagcctcgatcagccgccgtccaccgcgactgaatgtccagcgaatgtccagcgaatgctacatcgacactgtcaccctgcccgtctgcatctaccccgcccaccgagatgtcgaccccgcgtgacgaaatgcccgaagtcaacgacgatattttgggaggactggaagacgtggtcgttctagattttaaggggcctcggtccctaaagaaacaaatcgactcccgactgaaggaactgcaggctagtagctcctgccagcagttcatcgtgtgccggaacgttgggaaggagcaattgactagcatagatcagcaacaaagcctcggtagaggcattcgaaagtcctataattcaaacttgcaaattctcgtgctcaagatactgactacaattcacgaagccgctcacttgaccctatggcagattatttggaggcagcttatcgcgatgggggatggagagttgatggcaccatgcgggggggggaccttcctaagccaaagcaaaatatcgtctaaggaagccgatacagcgtataaaccagtgaagcgaaaccaggggtctgactggcctactatcgtcctcgagtgtggatactccgagtcgatgcgtcgcctcgcattcgacgcacggtggtggctggtcaacgccggcggcgacgtgaagacagtcctcctcatctcaataaatggggagagacaggccctccacttcgaaagatggtgccttgctccgccttacgaccggcccgtaacccgcaacaccccgagtatggtcccgacgaagacgggcgaggtagatattgttgcaggtaatcccaggccatactcacgtactatatctgtagtaccgtactaatcattgcaatcataggtatcgtgacaggggcgccgctatgcctgaagttcgaggaccttgtggagcggccacccggcccaacggagagggacgtcgtcctgactgctgatcagttggccacatgggccaacttcctgtggaccacttatcagtaactaccatctcggtcggctgagcagcagtcaggctagtactaccctagcgtcttatgcctctctcctcgaatctctcgcgcaaaggggtcccagacgttgccaaccagacacgacctagtttcggtctttcttgaagcagttccttgaatttgtaacggtacccagaagctccaatcatttcactaggcgctgaagccattctattaatagtacagcggaacatgttatcttgtattctcagaagtcttgacattaagtctagcagaattgagaggatgttatacttaacaaacataaactaatacgatacgtatagcacctaggagagaaagcaagaaacgatgaatctcaatgataaagcagagcactgtctctgctatatagttcattggtattagcttaatacagacaagaaataaggccccggtactatgtgttttacatttgggcgacagacgttcgttgtttaatttaccatctttacttcaattcaatttctatctcctttatagaagtcttagggcggacgcgccgtgttctccaatttattcgcgcgtataataattgaatttacacacgcttctaccattttagtattatctagcagggtgatctagctaactattgcttcttcttgctcagcatttaatactgaattatgaaggtggcgcgtcgaacgagaaggccgcccatttaaccgggcgataggagatggtaaggaataccaaattcacgcgccaatggcgcgatttttagtttttctctaggattccaggcagtaatagcatttgctaaaagtagcctccaaatctttcaaggttatacgaagaagtcgaatgaactttagggacaatgggtgaagtgagtactccatattttgaggctatgttcctaggtgaagatatatatcggatctgctgatcggccacatacttgctagtatatatttcatttaccatttacataagagcatgcatgtcctctccagtaagcaaagaaggcagaaaagacagggatacaaaccgaaggtgagagcaggacaagcccccgaaatgaaacaattcagacaacatagtaaaaacccatgaaacagcaaagaatcaaccgagggcgacctcaaacaacagtgtaaaagttcataaacgccgagatatatataccaccctgctcgacatgttccatgtagccagtattagcaatctcaatacaggaaagtcaagttatttccaggcgttgagaccagcccacggatcggcggaggagccgggctgcgactgtggctgcgactgcgaaggggtcttgtggtgcccgtacggtctgctctgcgcatagccaccaggaccagaggcgtatgtaggacctgctgtaggaggataggttgtctgctggggacgcggaggaggcggaggcgggatatagccctgggcagccatatagtgcgagggctgagggccagcgccaggagccggcgtgccggagtttgagtagctgccgtacgggaccggggtttgagagaaaaattgccgattcgggggtggggacacgggggtctggtaaggatatgccatggggttgtagccatcggataggggagctgcggcaccttgctggaaatgctgggccgggtaagctcctggaccacctcccatgtactgcccgtagggcgctggagagtgggacacgcctggcaaggtcggagggtagcgaggtgacggctttggggatggaccggtggttccatacgccggtgtttgaaccgccgggggtggtgacttgacttttgagggcggttttgttgaccccgcggagggaggttccgttgataggcgctccatcagctggcggagcttctctcgctcgcggtcttcttgctctgagacaccgctggactgatcgcggttgttgaacgagtcgggattcctgcggagaccgtctgcactgttgcccacacccttttcgcgctcaatctgactgaggagctgcgcaccttctgaccggcggttgttgatgaaagtttcgacattcttgcggagactgtcgacattttcacacatttccttgtaaaaagtccgtgcttgcttgatacccgacgagagcccatggaaggcttcgtagaccttcttgtatcgagctagcacggaattgcgctgtcttgttatagactcccacttcaacttctcggattgaactcttttgtctcgacgaaggtcatcgtatagcttgttgagttcttttatcaaagatgattgtttgtgattcgcctgtacaagtatgttctgatatggcaggaactttggcaattgttttttgaagcattcggtttcttggccgacaatcgacttcaggtttagaatcaagaattccgtgatgtcatctgcgtggatctaaagacagagttagagatttttcgtgaacagacacgctaggatgcttaccgccgctttgagatctgtgagcagttgagacctctctcggtccacgagattgagtttctttagaatcacctccactttagcaatctgctctgcaacagaggcacgaccctcatcatacacatcatctagcagagtaccttccgccggactagtggcaccgtccttgcccttgctatgcttcgaacggactttgatcaatgctcgctggaagaggacatcggcctcatccgtttcgccagcagaccgcatctcatcaaaatcgctgtcatactgccgaaatgtggaagacaactgagaatcacttgcgctggcctcgttgatagtatctcgataagattggacatcccctcgaagcgtggtattgagtcgagagctgggttgctggccccaatctgctccatactttgatcgcatcttctcacacacgctctcttctagatctagctgctttgagcactcatctaattgcgatagcacttctagcttgcgctcctgcaactcgtcgaatgccctgcggaagggactgtgaccagcaagttctgaacaccagcgacggaactcactgtccactgacatgtcctggttcatgccacccttcaagacatcgagagagcctggcaggtcgagggagagcaagctagcggccagctcactcctggcagtctcggccttttcagtctcagctcgaagcaacttgtccttttcttcggagtaaatactggcgatctgagttaccttctcaggcactagttttttgaagatgtctggcccagtgatttccgtaatatcttgtccttggtataattcgctaaccggtatcgccttggcagctgcaacccttgcaactggtgaaagaccagcctcattagggaccggttggtgatagatgaaatcattgtctttgaccatagtggcaagtaaagcttgcacatttgtttgattatgcttgacgaggtccacgaggttcggacccgcctctgccgtcagactggaggtcgctggaggcgacgaggggaatgtctttgcccagcttagagcagtggcggactgcttatcggccatctgtaaacgagcaatagcaattccataagatccgctctcactgtccgcaaccacctgataatatgatgctactgatcccatatgtgctgccttggtctgcacaacaaccgtccagaccttgtcaaacacattcttttccacgaaattttgcattatctccgcagcctgcgagtagaggtacgctgcctgtccagccagcttggccaaaagcccaggcttcctctggtctgccacttgtttctcaaaaaacacctcttgggcttgagctagtgtgacatttatcagtgtcttgatggtgtcctctttcaggtcggttgatggcggatgtaagaagttcttattaatatatgtaaacattccggcggatgcctggaaagagtgataggcggtcttgagaccggtatcgtcggcccggctctggttggcagcatggcaacataggatggcggagatgttaaagataatggatgccttttcgaaggctagggagaattgagaagtagacgcatgagtgaaagcatcgtacctatagaaaaatagtaagcaaaagcggaatatacaccggaaaaatacccctaccatgtgaaagagatcttgatgtggttgtcatcgatggggaatctgaggtccagcagctctaactgactgtagtatcgatacaacagatcacggccgatagcgctgtctttccctacgcccctcatgtcctggcgaagtcggttgagagtcgcgcattcttggttgtatcgctcgggatcctcgccattgctctgtcgaatgtaatccttgaggggctggatccaatcaatctcgttggtctgcttcaacggacatgatagcatcggcgactgagccattgtcggatggttgccaggagcgatatgctcccatccaataatacgaaaaccgggcgagagaaaaaaacgcggggcagggatggtcagaagctccgtgtctgagggggtcggagtcgaggctgtggggtaagggagacggaacggtcagcgcctgatccctagtgcgtcaatgacgtcggccaatcaggtattcttcgatgcaaacaatctagaaggtgacacaataatggcagtattttgggaaagaaaagagtcgcctagagtgttgaagtgttggaatgtcggaggagggagatgtgggatgtgatatccgtggctgtgcctcgatgggcgccaaaccccaaattagccgctcaactacaaatacatagaacgccattgaacaaaacatttgaattttgagtaatatcagataattaatagatgggaatgatcacagtacagtcagaagtagagagcttctaaggcatctatcactcgagaatagtaatacaagtattctgcccctaagacctgggcagaacaggtccccaatatcgccggcgctatgacatgggtgaggtaaatacaaacggatatagagtacatgatgatttacattttcagctcgacttcttcgagctatccttgctgctatcgtcagcatccttcttttctgtgtccttgttggagtctttagagtcagcctgggatggcttggagccatcatcatgcttctccgtgagtcgatgccatacagacttcaggaaaccttcgttcttggcggcatcttcagcactactggaggtagagaaggggctacaagtgtagtcaattagtacaaaagccaatatccacgacgaactgtgcatcttacctatccttgttgaaattcattgtccgcttcgctgtcttatcgttcatctcgtctgcaaggacctccaaaatggtgcgctgattgcccgtcaggtacttaggcatagcaaccttgaattcgaccttgagatcgccattgggagtgaaaccgcgagcacggccattaagtttcttcatgcccattcctgacaaagtgattcggtcaccggtacccgtaccggtggccaccttgaccttcacttgattgtcgagagttgggatagtcacctcgccaccaaggatagcagtggtgaggggaatggaggctgtatatagaatgtcggacccggagcggctgaagcgatggtctggagcaactcgaatggagacgtaaagatcaccgggctgggtgcgagcaccagggggaacagccgttccagttggtggggagtcaccttcaccggtcactcgcagacgcatgccgtcttcgacaccgccggggatgtctatcttgatggtcttgcgctctcggacaacgccatgtccgttgcaggagccgcactctgatccccggggaacagacatacccgaacctccacaagcgtcacaggtggcggcgacttggaagcctccctgcatgagatgaacgcgggtacctgtgccgttgcactgacgacattgggaccgtttggcaccagacttcaatccgtcacctttgcaggttccgcacttggttaacggcgtgatgacaatttcctgagacgtgcccttcgcagcatccatgaacgagatgtttgtttgcacctcaatatcttcgccaaccaaaatttgttcttggaatgggttacgcccaccccggggtccacgccgcgctcctccggtaaaggctccgaaaagatcctcaaagttgatgtcgccagaaaatccgccgccaaagccaccactggctccaccaccaaagccatggaatcctcccgcaccagagaatgggctgccgccagcgtttggattgaacccgccattctgatcgaaagcggctgagccataccggtcatagttctctcgcttctgggcgtcagataacagttcatatgctgtctgggcttcggcaaacttgtctttggcctgggcatccttattggtatccgggtggtacttcttggccaagccgtagtaggccttctttatgtcgccggcggatgctttcttatccacaccgaggaccttgtaagggtcgggaacagccgcaagaggagatgtagtgtggaaggcctgtcgatcaaaaaaaaatatgttattagcaacccgaaccctgacagtccgtagagacgacataccctagccgatatcaccaaagattcttttctcttgcaaacgccctcccggaaactcctagccggagaagcagagaccgtggcatggtaatttcttgtttgcgtagatgagtgaacgctattgccggaagtctgcttagagcactgtcgctgggtccgcagcaggcgcgccgggaaagccgcggccttgggaaatgccgtggatggattcatggatagtaatagccgaacaacggttggacagcagtggtggttgtaagaattaaaggagatggatatttgagggaaaatgattcaagaaaaagaatgacagtttgaactctagagcaccaataacgttcaaaaccaatgtaagcttctctccggatcacagaagcttcgagtccttcggcagagagaagtttctcggaaaaacgtgtcaccggatgatgatgaaagagttgcttaccgaagcaatggggacgggtgctccgactacggaattccagcttccactctccccatttgtatctaatacttattgctgtcctcttggagctgtgtcacgggctgccacggttcttcactacatcctttcttatttccttcattccattgcccggacgttcacttcatactcaaggagcatgctccgcggccagaccctcccctggagagctgtactccatcaaacgccacgacctctcctccgacggccgtttcttgcatcaccgagatataatgcaacattccgatcaacactaatttcggcccgcttcggtgcctctcttccgtcgtcttcccgcgccttctctgcaagctccattcggcgtagagagaaacccccgccagaggaccctaaagaggaatcggaagaaaaggaagaggacgaaaccagtcacgatgataagggaacggaacgggcacctgaaccgcggaagaagggagccgattcagggaagcatgtcccttccgcagatcaggtagctcccgcgcggagaaaagaccggtcatccgataaagagcgcggagtggaagaggaagtcaagaaagaagccaatgcatcagatagcaaggggaactcgaatgacacaccttcgcccatcccaccaagtgatggtccggccgactccaagcctagcggcgcaagcagcggcggtcatggcggcaacgatgatagcgggaagaagggcaagaaggcctccggggaaaaggctttacaaaagccggcagttcccgacgtttacccacaggtgatggcaattcccatcgcgaaacgcccgttgttccccggtttttacaaagcgatcactattcgcgacccaaatgtcgccgctgcgatccaggatatgatgaaacggggtcagccgtatgtcggagcgttcttgttcaaggatgacaacgcggatggtgacgtgattgagaaattggacgacgtttatgacaccggagttttcgctcaaatcaccgccgcataccctcttcgtggagagtcaagcggcgtgacagcggttctttatccccaccggcgtatcaagatctcgtcgctacttccccccggagagcataccaaggccgctacacctccacccgcacctacgtcagaagacaagacgaccgaaaagcgaggtgatgtcgtggccagcttcgaagaaggcgcacccgagccaactcccaaagaccattacgaacctacatccttcctgaaaaaataccctgtcagccttgtcaacgtggaaaacttgaccgaagagccgttcgacaagaaaaatccaattatccgcgcggtaaccagtgaaattgtcaatgtgtgcaaagagatcgccaccttgaatcctttattccgcgaccaaatctcggcattctacaccgatcaatttccaggaaatctcagcgacgaaccggcgaagttggctgatttcgctgccgctgtatctgccggtgagctccacgagatgcaagaagttcttgagacaatgaatatcgaggagcgtctccccaaggcacttgttgttctaaagaaagaattgatgaacgctcaactgcaatccaagattaccaaagatgtcgaggccaagatccagaagcgccagcgcgagtactggctgatggagcaaatgaagggcatcaagagagaacttggtatcgagtccgacgggaaagacaagcttgtcgagaagttcaaggagaaggccgaaaagcttgccatgcccgaggtcgtcaagaaggtcttcgacgaggagatcaacaagctggcacacctcgagcccgctgcatccgagttcaacgtcactcgtaactacctagactggctaactcaaatcccctggggccagaagagcgtggaaaattttggcgtcaagaacgcagtcagtgttctcgatgaggatcattacgggttgaaggatgtcaaggatcgtattcttgagttcatcgctgtcggcaagcttcgtggaactgtcgaaggcaagattctgtgccttgttggcccacccggtgttggaaagaccagtatcggcaagtccatagctcgcgctctgaacagacaatactaccgattctccgttggtggtttgaccgacgtggcagaaatcaagggccaccgacggacttacgttggtgctctgcctggccgcattatccaagctctcaagaagtgtcaaaccgaaaaccctttaatcttgatcgacgaggttgacaagattgggcgtggtcaccagggcgatccgtcctctgctttgcttgaacttcttgaccccgaacaaaataactcgttcttagaccactacatggatgttcctgtggatctttccaaggtcctcttcgtctgtacagccaacgtgactgacactatccctcggccattgttggatcgtatggaactaatcgaattgtccggctacgtggcagacgagaagatggcaattgctgagaaatacctcgcccccgccgctcgggagctgactggtctgaaggatgtggatgtgaaccttgaacgggatgccatcgaggagctgatcaagtcgtattgccgtgagagcggtgtccgtaacctgaagaagcaaatcgaaaaagtctatcggaaggcagctttcaagattgtccaagacctaggcgaggatgtgctgcccgaagaggcggcacttacagaagcgggcaaggctgcccaggaggagtcaaaggagcatgagccagccgatcctgcgcaagttccggtcgagccggagaagtcgaccacagagatccctcgactggctctcaaggttcccgacactgtgcatctcagcatcggcaagggaaccttgaaggattacgttggacctcctgttttcacatccgaccgcctgtacgaccagttccctcctggtgtcaccatgggtcttgcatggaccagcatgggtggagcggctctgtacgttgaatgtatcctggagaacgcattgaatcacaactcgcgccccgggctcgaaatcaccggcaacctgcaaaacgtgatgaaggagtccacccacattgcgtattcattcgctaagtctgtaatggcgcgacaattccctgagaaccggttcttcgaaaaagccaaggtccacttgcactgccccgaaggcgctgtcccaaaggatggtatgtgaaacttatgttggttaatattgtaataagtcggcggctaaccattccaataggaccctctgccggtatcaccatggctagcgccttgttgtctttggctttgaaccactcccttgagccaaccgttgccatgaccggagagttgactgtaactggtaaggttctgcgcattggaggcttgagagagaagactgtggctgcccgtcgggctggtgccacaaaagtcctcttccccgcggacaacacatctgactggcttgagctacctgaggtgagtcatcaaaatcattccattcttagtggttactttagctgactgtttactctagaacatcaaggagggcattgaaggccacccggtgaactggtactccgaagtgtttgaccttctcttccccactctcgaccaggaggctgcccgtactgtctggcaaaaagcattggccaagcctaagaaggagagccacgaggtcgaggaagagtagcatgctgatacctatttgggtttgggtttcctctttgggtaatgtcgtatatacctgttgtgttttacgttgtataggatttgtgtgatttattgtgtacatggcgtctttgtcttccgacacggaatgcatggccggagttgaaggactgctagtagaccttttcccatgtgagagctgtatggattagagcgagagccaaaaaaagattactccactcaaagcaggaggtgtcctagtaaggtacatgtatagtctatagtgctattgccagcgataatgcaaagataatgcaggcctcacatgcactccgtattatcgagtcatattaatgtatcccgatttagggctgctgtcgtgtcatatagattgacgccaaacaaacagggcgtgaacggagcccccaatcaggcataagggtcaggccgcaacgcattctcgaatttttgatctgtgcgccattcgatgaatcatatctttactcgattttttactccctcacccttgtgtcccttagaagggcttctgattgatctcctgcaaggtccttttgcctccaaacatttcgaagccttgcagcggaagcatctcatcaccgctatcaaacggctgcaggcgattccttaggggagaaaatttagagggaaaaaaaaagaaaaagaaaaccacttatatctaaagaaatttcgtcttgaccgacatattctctcctccttttgcacccgcccttttaccttatgagcttgtactggaccggtctcccagcctcgcccattgcagcccgacgttgtgcgacacttggacgttggacctcgaagtgaaccttccaactcttcgaactaaaaggagactatttggaactggtgggacgaaaatcgtgtcagtgcgacacctaactttcctacctccttgaccctgtctcaattcttatggacatcggagaatcagccagcggggtgttcgagtcgttccttgcacgacagagcggcttgccgtatggccatctctgttcccaactcccgtagcccgacgcggctggctttggacgacaaaggcggaaatccgccaaagcagagcatgtggcaccggttgggattgcgaaaattatggcagggccgcgacgatcatcgagacacgtctgccggggagagtcaagacgagatttccccccgcccttcttctgacaactcgcgtaccaaacaagacaatttaacacgtcgactctcgcgaaaagttggcgtcggtctaccccgagccaccccctttaaacgacaaagctccgatctcgagcgactggctcctcgagaacctgatcatcgccgtgccctctccgccgaccgccgccccttgaccacccagagaagtaggtctccaccgcccaccgtgggccccagactgtccgcgcccgaagttcagtggctcggcccgacgcccacaaccacggtcgatgaccctcccgaaccagaatccgaaacgaacgatacccacgagattgacgatatcccagtaaatacgcatccctattcgggaatggagacggataatttcggggtgccagaggaggaagatgacggctcaatcgatctggagatggagctggaacaacggtggattttgaacctgagcatgcacttccgagatgggacagagcgagagaaattctttgtgacgtacgcggagacaccgaaccgatggcgccgagtaacgatttcctgcgattaccacgatgcaccaccctattcactggagcgggaattgaaggagctgcggtatcaacgcgacaaatgcgcgcgcatctacgaatccattcgcgagtcccttcttgcgatccaattctatgaaggtgtcacgaatctcaggctcgagacgagcgatggccgcttacatgttcatgtgacggaggacgtaaacgaaacaatcccgtacccgcctatctccagtgtgaggcatttggtcaatgcccctatgatccccgaggacttgttgcatttcgaatctcatttatccggctttgtttacaaaataaacctggacggacgtttttttatcaagaaggaaataccgggccccgacactgtggacgagttcctttacgagattaacgctttgcatgcgctaaaagaccgtccaagtgtgatccaggtggaaggaatcgttgtcgatgagtggcgaggtgttgtcaagggcttgctgattagctatgcagaaaatggcgcactggtagacattctgtatgagcaacgcggaaaaacgagctttgcgcgacgcgaacgatgggcaaagcagattgtccagggtctttgtgagatccacgaatcgggctacgtgcagggcgatttcaccctcgcgaacattgtggtggatgcagacgacaacgccaaaatcattgatatcaaccgcaggggatgtccagtgggatgggagccgccggaaatcgccgctaagatcgagagcaaccagcgcatctccatgtatattggcgtcaagacagatctcttccaactgggcatgacgctgtgggcattggcgatggaggaggacgaacctgaacgacaaccgcgacctcttagaatgggcgacgacgcgaagattccagactattaccgacggatagtggacatctgtttaagcccgactccgcgacataggctctctgcgaaagagcttttctcaatgttccccccactgccggaagcacgggtatcaacgcctgttcggtcactggaggacattgccaacgagtccaggcacttgccaatcaggaactgggctcagcctcagccgggaatgatgcagcaagatggccactattactccgaaaaggaattttcggaagattcctacggtaatctgcagcactccatattctctgaaaatcacgacctcctccagcgatcaacaatacctctcgcagaatcgaatggagacatggggttctcatctaagccatcttcttcctctaccttgaatcaccacgaacctcacagtcatgacgagtacatggatttctcccgccaattcaatgatggctcgtcactttacccaccttcttacagtcagaatccagaagctgctccagtttctcagacaaggtcaatggacaatggcttccacaaccagccagtggaactatcggcctttccaaatgagcctgtctatctcgaaagtgcccctatgaataatcagcaagagacactcaatgagccgacctatcgtaggggctctccaattaccgcaccttcactcccgccccccgtcagcacatgtcttgctgaatcgcagaaccagaacgctctcaacccacccagtccaaaggccgccaatgacgagggtaaacttgaagcctcagctttgccaattaaccctactttgcgtgactccagtaaatcaagtggcactcaggacatccttttttcgacaattccgtcttcaattaagcaagcaaagcaagacggtgtggatcggccatgtgcgaagttcgccaatgaccaggatgaccttgaatcctcatctttgcccctcagccctaacttccgtgactctgagggttttattagccttcgatttgggaaagcttctcctatcgactcaccaaaggagaagaatgcggacttaccatgcgcaaatgtcgaaaccgaacctaaatcaactgagccattgccctcattaccatctccatctctctcggaactacctatcagccctactttccattcttctaaaacttccctcggcgctttgggcaccacttcatcgctgaactttttgcctgtcgaaccgttaaggcaggataacttcaatcgaccacgtgcagaggctaccacctgtaccaagcctatacccacaacacaatccaactcaacatcttcccagcttcgcccgacatcgtcggccaatcctactctagctcgctctgagccttcacccgagcttccaagcgtccctcaatcagtgaaatcttctcctatcgagccaccgaagcaaacttatacgaattcaccgtgtgcaaacaccggtattaaacccaaacttaccgagccatcgccctccacatcaagtctggcccgttcggaattgcctatcagcccaacattccgttcttccgtgactcccattaacactccaagttccccttcatcacagggcccttctcctactgagccaccaaagccggagatgctctatgaaaacgatatcacacccacattaccgtcaacaccacctcgacttccctcaatgcacatttcccacctccgccacaccggggcttccattggccctctaccattcgctacaagtccatctgtcgttggaattggactgctaagacggccatgggaaaacccatctgcaaataatccagatgtcaagtccacctcgacaatgccattagggtcagtctcatccctcaaccctcagacttcaaagaagcaagagagcgccaaaaaatactccaaccccatcgaaccgcaggagaatgaacattcactgaactccaactcaaatctgctgggttcgagattgccaatcagtcctgcccacccaaattcaacgcctagttcgacttatcttggggttcatggctcaccttcaagtcaggccaaaccgggcattttgagccaggcacgtttttcctcgaatcgaatatagtcgcaaatacatccccccgcacaaacaacttcgccctgataggcaagttcacacctcgaaccaacgcaagatcactaatatttttacaaaacaatcttgctacattggccgacgacgccacgacccatttctccgaacgagccccatattcggggccgagcactcgatacccttttgatttgctctgcttgtacagtttatgcctcgtcgtttgcctcgtgttattcagcttttggaagcattataccgatggcgggcgaacctggagtcctaaaaagtcctttgtttttttcttctttgcattttggcggattttaattggtttttgctagggtaacagcttttcttttgttttcccctgtctcttttgtgctctctttaatttccttgttgtctattctatggtttgtcggaggccctcgttctgcgttctggtgttctcacccgggaagtcgatgtatattgatgggatttttttatacctcttcttgtctgacagggctgtattatttctttttttcgttatttggcaatgcaattgttggctaggactgactttcgcattctaaccgtaaataggccctgctatctccttccatggagcaatgatttctttatgcttgatcatagacaatgaactctcctcatttggcaaccaaacaagattcaaaactctcccgccaaggctctgcacttggccctagtcctcgtccaatcagcacaattttgcactgaagtggtttagacttatcctcggtatctataggctccgcatctcgaatctcgaatacatcccgcacggcttggatgattctgcttttcccattatccaggatcagtataccttttaaccgatgaacctcaaagtctacggggtgtggttcggatgagactgatttcgcaggcgcagggaacgttgtatcccacaagacagagcgcagccaggcatccacacagtttaccttatctgccgggatcggaggagtaacgatcgcaatagtagaaattgcctggttatagttagaatcatgagagcattccctgtttgcaacaagcaggaaacagaagaggatataaacataccgggtccatatggctatgtcccttcttactgaagtccaaatccgccaggtgatcataagcatgcaaatccaacacaacgccctcaatctgcggcgtccgactatgatctgtcacatgaatcttagccacgctgttaatagaggcaacacgatctcgcacagcctccagctcctcgtctgtgacgagatccgttttgttgaggatcaccacatccgcatgtgagatctgcatatgcgccattgacagaacagggccagaaccgtggtcgtggtgcacgtcatgcgactcggccttctcttcaggcgccggctcatccagcaagcgcatgatgttctttgcgtcgacaagagtgacaattccatcgaggtagatagagctgcctagtccttcgtccatccagaagattggggcgatgttgcccgggtcggcaagaccagtggtctctagaaggatgtaatcgaaggtgccgcggcgttccatcaatgactcgatagccattacgcctgagtctttcacggagcagcagatgcagccatttccaacttccatccactcggtcacttcttggccgccctggtttactgtcattggtttttcaatatccattgctttgtgataatgttagaatgtaagtttttagtcctctggttggacaccttacagtcaccaaattctggaaattcattagcgacgtgtatcatatctcacaacccggtgtaatagacgaaccgttcatgatcaccgcaattttcttgccgtgtttctctgtcaggatataattcaagagagtcgttttccccgctcccaggtagcctaatcggcgtattagtctcgttttattacttaaatcaatatgcactctattcaatcataccagtaatcagggtgatgggcacgcgagctgttggttcttcatctaccgatgtttggtctgctggcgttgcagacacatcgataagctccggaggagcatcctcatcttcaaaattggcagacataatgtgctagtctttgaatgttgcgtaaatacgtagaagaacagagtctgaagaaacctcgtagatgcggcggatgacgttgtttcccaaagtagacgttagggtacagggctcgggcggtcagcggttgttatgttgatggttatctttagcgtctatgcttgctctccatactcgacctttgatctcattaacacagtttgacagggcgtctagagaccattcactctttttctgtttctcggtttctctcatttcatctagcgccctcgttttactgtcgtcatgactgctgcgggagtctccccgtcaagctccccgcggcttcccagtcctcctccatttactgaggttcagtttgggcctcagtcgccatcggttggcgactcctttgccaaagatacagacctgcttggcgtcgcgatgggacaaaatgatggctcgacgcgcagaatccggccagggaccaaatccgccaacatggcatctggtccaccagtggttcccctttcacaggttagttgctctccactggctattttggacattactgataaatacagcttgattctccattccagctccaggaacacctcaaagcccagttcaataagcttgcgccccagtacactaaactcaaggagaagtacgatgtgcttatggagaagcacgaggtgcttatgaaggagtacactgagcagaagctgaaagcatctgacgaggcggacccgaactacgatgtgcttatgaaggaatacaatgtgcttctgggggaatacaataagcagaaccccaaaggatttgacaagatggacctgacgagcgaggttgcggaagagccgacagaaccctcgggaatcgagaaggcgaaagagccgtcaagaccggggagcgaggtagcgaatgagctgacaaaacccccgaagggattcgaggagacggtctggaaatacgaactgtgccgcttcttcactatagaagccaaccgcctgatcgagggctttttctctgaaagcccgccctgctcgtcgcaaacttgtcccgagatgcgagtcaacgattggcagtacatttgcgcgggcgcaggacacccggaagccaaatactgctgcgcgattgactattgctgccatactctggactgggccatgaacattctcacctcggagaagattttccctagccgacttagattgtcaggcgatcagaacaccagaaaccgcttgcatgatatcttccgccgcctttaccgtttctttgcgcacgcatggtaccggcatcctgctgtgttttcgaaggtagataatcatggtggtttgtacgtctttttcaagaccgtttgtgtttactacaaccttgtctcggattacaccatcccccttaaggccggaggacctgatgaagccgcagcagcccagaaaagggaagcggccaagaaaaggagggaggaggtcgagggaaaagaaaccaaggaaaaacctgccaacagcaacaaccgtttcaccattctacgcaaggaaagtgataacacattcggtattgctgtggagagtcaagacccggcgctcctcactggcgcgaccacccgtcgccataagcacagtccctccacaggatcgcgtgttacaactatcgcagaggatgcggaggatctggaagagattacgtcatcgtcattgcatgagcccctgaagcaatcgcttgaaccgcggcctgtttctgttttggaaatacggaccccaggggaacgtaccgtcgcggatgagccaattgtcgatgtggaagaatcctctgaagagctagttgaggaacctcaggaacagccaccgcaagaaatccatgagcagccatctgaaactgccgaagaacaggagaatagtgagcaggttgagcagaccgagcagaccgagcagactgaggagtcttcctccgaagagccggccacaaacacagaatcggctatcaacaagcatgctacggaaggcgatgaaaatacaacttcccacgaagaggagactccagctgaagagctcaaagaggcggtcgaggcggtagaagagccttatgttgcccccgaaaccaaacacgagccagagaaggaggaggagtcgtgatatcaaaaccctctcgaacctttcatgccaatgttacacgactgtttgtatgtattcttacccttgatcagcgatgagtcgcaattctttacctaccagatacttttttgtaatatagttcaggatattgtttatgaccaatgtcaatgatacccattttcctgtgctttctatatattcatggataaaacaaggaatgtagtccgcgagtgaaggggacctcggagtcccgaggtgtggtttcgagattgatctgataagcgcttatcaacacatcgtccgacatcaccgaaaagctaccggggataagttgacaaccttcttattcacctcaatatctcatatccaactccaaaatgccagccctcaaagctaccacagcgccaatctactttggctccttcattgtcacaccacaggtaaattgctcatgatccactcaacccccagtcttctcaaccaacaccaaccacgttatatcacagaactagccatagacacaagtacaaccataaccatgaacacaactaacgccaacacaccaacaggtcttctacacaacgtccctaaccttcgccctggtaaacctgaaaccaatcctcccaggccacgtcctagtctcaccacgccgcgtcgtcccccgcgtcacagatctcaccccagacgaaacaagcgacctcttcctaacagtccgacgcgtgggtcggatggtcgagcgcgtatacggtgccacaagcttgaacatcgccattcaggacggcgcagacgccggccagagcgtgccgcatgtccatgcgcatataatcccgcgcaagtcggcggatttagatcatgccggtggcatggatgcgatttatgacttgctagatgggcaggagggggatttggggaacgcgtttaagaatgctgctcctacggaagagggtgaccagtctgcgaattcggggaggagatctaggctcccggttgtggataatgagtcgcgcaagcctcgcagtgaagatgaaatgaaggctgaggctgatattttggcgagggaaatggagaatgagcctcttgattaattgggtctatgtcttggatatgaaggtccgaggcaattgtgtatatttgaggttattccctctaccgaagcttcaattgctcgcggacatagaagttccaggtagaagctgcggtcttgtggcacggatgaactttggttggatcgactgtattacaaggtcaaataatcaatcgtgttcctccctcattcgtattgaattgaagactggaaaagctgcatagaagttgccgaggcagagctacacgtacttaccagataaccaagtttagtggaatagccctgtagtaaccatgtgctctcgtgattcgtcctctatggtatctaaagtacccggaaaaatgaaatgcaaatgtaaaaatgaagaaacaaacgccaaaaatgcaatgggtctttcaaacaagcccagtgcatgccaactcccccgtcacccattccctgcaataatgcgcaagctgcatgcatatttatgccttcttcggcctttcctgaatgacctccgcagcccaggcctgaatctcgggcaaccgaatgcgcgaggcgacgtgggtgaattcggtgagatcaaccttgtccgaacgctcatactcaaccatttgcaacaggagctccatcttgtcgatgtcatgcacgaagtgggcctcaagagtctcatccttctcgtattcctcaaagatttccttgattttcccgcccgagaaggcgcctccggggaccttgtcgaggagggtagtagcgatgtattccataacggaggcctcgcggcgagccttctcggccttggggatgtggtagtcgactggagtgatatcgccgacaagcgcctcggccatgtcgtggatcaaggccatctttgtgcagtgcgggatgtttatcttggttgccagggacggcggggccatcatggtcatgatcgacatgcgatacatatggtcggagatggactctccattgataccgaagcggcgccagccctcgcgcttggtggtcttgaggcgctcaatcaagtggaagaaggggacgggtgaggtagagttctcttctggacggtaggggagggtagagagcactacggatattagctttgcatagtctgaaaagaggagtttgaggcttaccggtctcggggctccattcaggagcgtcggacgccatggctgatgttattgaagagagagaatgaccgagaggaagaacgcagcacaagtaaagaggacaattgaggaggggaaaaacaatctacaataaaggcgggtctgataggcgctgcaaacagtgcaaaccttccttatctatgtttactctccgccgcctgtttactaaagtccccttccacacaggatggctgcaacaaggcctgttcggccgaaacccctagactggccgggtccctcacatttggatgtgtttattcgcagtctaaagctattgcatctggaccaacgcgaggattggccgggtatatctctccccaccttgagcccgacaccacagaaccaacgaaaccgaatccgactgatagaatgggccttgtatcacctctacgcaatttgggatccagagagcgctcacaatgtacagttactcaatcacaagcctccaattcgtgaacttggctgacatcccctacagaaactccgacccttcttccccccgttagagcctctacagtccgtcaacctccgcgcggctttatttcgatgcctaggcgaattgaaaaagaatggcgatctgggaagggagattgtccttcgcaaaaccatgctggatgattgcaagggcgataaattcgaggagctccttgctagcttctccgcggccgttctccgtaaagttgtggcggtgtccgcaaacgagatggtttggaatcctgcgatgagactttcgaccacgtcagccatgaccccgaccgactaccggactctcctgccgctcattcttgcccaccaagcatctctcggttctgtgggagaacgccatgcccgagttcaagaggcgtatgaccggttctcgaagctgctggatgataaaggggtggagctgaccgaacgtgcggatcaaggctcaggaggtcgtatgaatgatatgcagagtgatcccgagatggtgcgtgagttacaaacaaattggctaggcagcgaggaatgggccgctgcactgctccaaggcggatcacaaagcaccgccgacgcttttctggaactccctttctcggcggcatggatgcaggcaaagaactcgaatgtggacagttacagcagtggcttgaagcaggatctagtccttgatttggaggctcgcgttctggcccaacgaagtcgactgcacaagtggcacgaatataacaagtccctctcaaaggaaagaggtaccgacgaaacgagcacagcctctgctaaagaaccacgtgtgttattccgggatcaccagtctctcacaattgctagtatatccaaagctgttcgtcagcctggggatcgcgggcggacgttgaaagggccggataaatatctcctttcctctgtaaatgaggcgctctcccgcatcaatggaaaatcccgcgtcaagcctgcaggttttacaccagaggttagaaagagcagcaaactacaattcagaagcttgtcggagattgtcagctcgccatcaacagtagcagaagactaccacaccccaggtcattcaccagacttggaaaccacagggctccgttcagagcctgagaccgagcccgagcccaagccacatccagaatcagaatcagaacatattcaacgctcgcccccaaccgtccggctctccccagacctcgcctcgtctgacgaggaaccagctccagaacccatcaagcgctccgataccttggccgagcgcacgcgcagatcaatgtctctcctcccacccgtggcccacgaagcgccacgacgacgacgcagaccccgcccttccttcccagtcaaccagttcatcactccgcgaaaggcttccacgcactcagctcattcaagggatgatatctcgcgtgcttcgacgccgcaggatcggctctttgaggaagatgctgagtacgcaagtgtcttcaagtcccggccgcgtgtggcacttagtcctatctcgtcaccggctgtgcatgtcggcccctcttctgaggaggatagttttgatttggattattatgatgatggggatgagagtgaagattttgagtgggggcatattgattcgcctctagctgctcctcgattgaggcggtaggttgtgaaattagtcaaattatacatatgtacctatacatacctggatcttctctgtggggagggtcatttctattgcgttggacagaaaatatactacacacggatcataaggatgtcttgaataatggacggttcatacgtgaaatgacatggcgatgttgttgacagtgagttgattaatagtagcaagtgactaggtaaggttacacatcacttggtaatagacagtttcaattagttcaagcccagcgttagagtgctattggcttgactccttagatcatgcctccgtatattcacgggtataagattacgtttataaggtttaacatgaagcttatctcgaatcttaatatactactccgtacctaagctatggacatatagatactccgtatatcaattctaataatatttttgagcaaggtagaagataataaagaaagaatgtataactgaaaagtacatttcgatagagtaaactatttgaagtacctcaaatagcggtagagcagtctagaagcccaaaatacttctcaaatatcattggattataatttctacaggctttgtaaaaacaatatcccaacaacaaaaaaagccaaggattttaggtgcaaatgggaaagtggatctgcgacgaggaatcccataggacaagatgtgagacgtaggtaactcgtggcagtcactacgtgtttggccggcatagccctaattggtatagcctgcctaggacccggttatacatgtatattgtccaactagatatgaaaacagtagacggtgaatacagaatgacccgcacgggaagggaaggtcgagtggggagtgtctcccggaagatgaaacactgacgtttgagataaattggggacctcggttttcgagccctatactaatgttaaatccttggaagtacttggcactccttacctatatgcgtacttcaactgtacaatagtatagataaagtgtgattctaaattggaaaaagtacgtcgtactatgaagtagtaattgcatctgagatcctagtaacctgcagcggccataagcaagatcaagctcctagaaacttctccacgttttgccagcgtgacagagggatcaagtctccggaggcccttgctcatagtctggcgatcttactctttgtagtgtgtaaatgctgtaattgccctcgagcattggtctcgagataattgccccgccctcgtgcgctacttaggcccctcaatattttcatgtccgaatgatcatattttgcggatggtgtcctagaaattaagattaaatcagaaacttcccttccgaggttcttcggcgtcaacttctccctcatggcgtctccctccacactggctcactccctaggtcataataccttgggaaagacagatatcgctgtccagtcggtccttttgggtattgtttttgtttttgtcggtctgcggttatggtcgcgacgattccagtcgctgcaattgaatgatttgttgattatagttgcgacggtaaggctatctatttcattgcttattctcagtgattggcaccatggctccccgcaatatctccacaaagctgaccataaacatatagttcttgatggtcggtcgctatgtggtggaaatcatgatggtcgtgctgtgtggaatgggactgcattccacagaggtagcccaggtccgagggtctgaggttttcgtccaatttaatgaagtaagtcacaatgagtggcatctatttgactcttgtcgatgtatgttttttaaactaaccctaccatcagcttacatatgcgggtgatcttctctgggtcacggtgatcgcattggttcagctgtccattctcaactattatgtgcacaacttcagtcagcgagctctgaccgtgttagcatatattatcacggtcctatgttcagctctctgggttgcgagcttctttgcaacagcgtttttctgcaccccgccgaagagaatatggcttgccgacactccgggtcactgcggtgatcgagaaatgttgcataccagtgtcaatgcgagcgaggctgctctcagcttcttggttgtcattcttcctgtttcctggatgtggcgcataccgttatcgaagaccaagaagattgcactgatttgtatccaactgctagggctggggtgagtaatccgtgattgtatctggacgcaacgaatatatatattacagacctcatgactaaccaataccctagaatcatcactattattgccatccgcttgaaaagcgagtttgacctcgacccagaagacacaacgtacagctcagccaggaagtcaatactttcatgcatcgtgcctcctctggggataattgttgcctgcctcccaactctggagccagcaatccaaagcatgttcaggaagccagcgcttccatctacagcccataattctatatatgatccatcctttgcgaggtattggaaggcgacggtcctttcgggtaaggggctggaggaaccagagatgcctctggtcggtcttactcagcccttcatggcaaagatgagctatcttgctcctgggaatatacaggtcacttcacattgggagattcattcgtcgcgaggttcagcaagacttgatagatcacccgtgcggtaggtccgatgggtttgatatcgggatatttggggcttatatagattgaaatgcatagatctagacttcagggctggtacccgaaatgaagtaagttccttttgctatatatttcctcaaagtacagtagatgcatatttaataaaagttggaacggaagtcatactcgacgagatgtatggacctgaaggatgaagatctctatgcatatagatcggtttacgtgcctcctttttcgcccttgaattcttaattacggtatacagcaagcctaggagagaaaatctacttaataaaagacgaaggcgtaaactagtctacatactctcaaattggtaaacatggctatgctttatatgtcccggccgctgagtcttttcataacaactcatcgtggttggccaattggcctagtggtaaggcatccgtttccggtgcgggagatcgtaggttcgaatcctgcattggtcgtcaactttttgctattcttctataggaatacatttttgcgtctttttagttactgcagtcacgggtgaatgctgggttgttagggcttcatgcacattaccgcgcgaatttccctttcccttctagtacttaccccctgccgcttttttctcactgagtataactgagcatggatgccctggtgtattacgtaatcatccgtttcgcgcagtggacatcagctgagcagctaataatccactcaatgcgccctctgtttttctagaatgtctacaggcaggtcagggcggagaggacgaggatttgtcagcttaagtacttatgatttggggtctcaaactatatcagagcaacaagcccatcatccttttgagccttcgagattaagatcactgatatatatgactgacgatggataatgcaatctcgacggacccacctcgtcagccgaagaaagtgacacttgcatgcgaaaaatgccgtgtccttaaggtcaaatgtattcgacccgaggaaggacagccttgtactaagtgggtatcacatccctgaccgtatacttacactctggttaatttgagtagatgtgccagatcaaacgctcaatgcgtattctcagagccgaaacagcgagctcgagcttcacaacgaacgaaaccgtaagtggacgtggagggtactcccctcaagatgtcacttttgctgacaggcgatgaaggagattagccgagctggagtccaagctcaccaatatcattggtcttctatcacaatctggcgcaccccttcatggagtccaaacacccgttgatccagattgtgggctggctgcaattcctgaatattccaacgacaacccacacccaacagctgaatggatgagccaagggtacctggctgatcctgagttgaacgaagccctaggggcgagcgaagagcagaataccaccgaagttgtcccagaaaagtcttgggacgccactgcgatagacgctgcatggatcaccgaattaggactcggtcctgtcgtcctcgagcatcttctagacaagttccgcggcatggcgtcctattttccgtttgtgcagctttcatacgcctggactgctgcatcgatggctgaggaccgccccttcctattacttgcagctgttgctgctgcttcctcacagtactgtcaccttcaagacgccctgatcagacaatttaagcagactctcagtcagcgggtaatcatagctggcgaaaaagatctagatctgctccagggattacttgttcaccttgcctggtaagatttcagtctccatactgccttcgcggcatcggaggcaccggcaagctgaccaatgtcaggtaccatttccactttgttccaggaagtgcacaatactaccagtacttgcaaatcggaatcggtatggtcattgagcttcgccttgatcaagaggctgccgaattgcttgagcaacgaactgagctaggtgatgcttatatccgagaagcatgccgtgcttatctaggctgctattacatgtctagcatgtaagatgccattccccgccagatacacgccaatgagcttgagctgacttggatagaatatcaatgtcttctggaaaacccaataatctccagtttcacgaggccatgcttcgatgcgctatgatcctgcaacaacagccagaattcgacacagacctcttgatatacccagtgacgaaagtgctacagttcgccgaggaagtctgcgagacttaccaatccgaaggcattcatgggactcggctgtacattcatgctgaacgattcacgacgcggttagaggaatggtggtcgtctctatcaacggatcttcgcagcacgggtaggaccatcccaagctctgggcttttgaattagctgattgagaatccctagtgttgctgatcaactgctatcataccgtcaagatccggattcaagaaatgggcttggtatattgctatggacagagaaggccaccgtctccaaaggcacaggaagattccaccatgttatccacacccccaatggtcatcagcaacttggtcaaatgcgtcagctctaccaaggagtatctcgatttgttcttcaccattcccgctgtggagcataacagcttgccaatttccgcatggtatcaagttattttgacgatatttgtgctttacaggttgtctgtgggactgccagaagtacctgaatggaacggggagattgcacaggaaactgtgaatctagaggaataccttgatacactgctgtctaatctacaggctattaaaccatcgccagataggcaaatccccaccaagagcctcttttcaatgatgcatgagatcattgggagtgtgaagaattcctatgcattgacaaaagagaatctcgcacatgttcatgatagtcaccatgcacatcacgaccttgcttcaaaaaacacagccgcatctgctcaagggctgcaccgctgccctgcgttgcggtattcgagtcgccgcatcgctcaagctccggatcagcctacactacaaaacgccattgctacggaagtccagaagataggagatgagaagctgtggggtgatattctattgatggatgcatttcatagcatgacaggttcatcagctacagcgttttgacaagttatccatgctccagacctcaaccctgcaagcccaaaataacatcagatctcgtccggaaagacatgggtggaaatctgatttccggccgaatcgtatcggtggggcagcacattgaaaagtccatcaacatcccgcggttcataatcaagcgacaagcccgcgagagtaagaatttccagcccaaaattctctttgatccagtgggcaaccatatccatgcccgccactgctccactcccagtccagatattgccatcaatgatccacttcttctcctttgtccacttgacattcgggtatttcttcttcagccaattgtactcgacgttattgaccgtagccctcttgccatccagaacgccggtggctgcgacaatcccagcaccagtgcaggtcgtgaacagcagctttccagcggcgacatggcggcgaataaggccctgcagttttggagcaagattgctgttcgtaggactatccccgccgacgatgagaatatccaattccgggacgtcatccgcagtgaccgtaggcatgattgtcacagagcttgtaagcaggtgcaccggctccagggtctctgcgatatggtggaagacgaattcgggtgcctttgctataaggttcggatcgatggggttgaagaaactgatagcctggaggagcgccttactcgcggaattgagtacatcgaatggtccgataacgtcgatcgcctggtaattgaagagcagagcgccgacgtggatgggagccattttggtaggtttatcaaagacaaatgtcaaaagaagttgatttgtttgttgatttgcttgttgatagtcaataaattgtgttggctgtctttgctacttaaatactttagggctgccattttctgggataccataatcgcggagcgggattgctcgaaggctccgccctccgtggtcgacggtcttggcacggacaacgaggtaaactcatggaccgtgtccgtgatttgtggatttgaaatctatattggaagattctagagctttagagtgcgaaattgagtatcgagatgcttagagtaaatgttatgaaggtatatatccaagagttatcgatcttgtctcgttacgacttggtttccctatgtctaggaagttttgatcccagagatgatctgttcatactagcagatctagaccttcaagaaacggttcataaagatttgttagtatgtacaacatacaatgtaggtcctgtaggcggtgatcgtttggaaggaggggtaacggtaatagagcaaccgaacacccttttttcaatcagtcccttcaagtttcctaccatctcctcagtgttaaaagacagcctaacacaaaaatgcatatccctctagagatatgtgaccaagtaaacactctgctcctaaggccttaggttcggtgctaattatctacacagattgcgtattatgtctggctcgatgacggccgtgctctatatctgtgggacgctgcaaagcattactcggtaccttactggaggagtcgaaaagacttagggaatctgcgtcttgtcaacaaagctttctgtcacagtgccgcatcctggttgttccggcacattgatgcgagatacagcgcctgtagaggacccccacatcttgaacgacttatgaaactatcaaaaagcccctacgctgtgtatgttcgtcagattgatttcgggtttcaagagacgggctcggaatctaccgcgtataccgccgcattgtatatcgaagacctctttggatgcctgtcatcttgtttgatcaagttcttcaacctcgcggcgcttgaatttcacgaaccacccctgggcctttcacaagagcagagaagggcctatatggatgcggtttcttcgactttacgttacgtgccgctttcaaatttgagagaactggagttgaaattccccctaacctatgatttcggacgtttcttcccgacccagaccagttcggtgcagatccctatcgaggatgtcacgcaaagtcttcgacatcttggattatattcctgtgaatatacaaatacgcgggaccaaaggtactggttgaaaccagtttcgccagaaaatgctgcactcccgaacaacgtttatgccacccgaatgttacggatgattgaaattgcgccaaatctccaatcgctcgcaatacatagtctcgacgttctggatattgactttctcgcctttccatcctctctctgcctacggtgtcttgatctggggggagtttctatttcatgcaataatcttctctcacttatcaaccaatctatccacagtatacgctatatcaatttctcgcttgttaaattgaattctggaacatggagacaggtcttggtacgaatgtgccagttaccatatcttcttgatatcattatcgatgccagtgggtactcgttgactggaaccagctctgatctagctcttgggctgcttccagaacgagattgtcctcaagatatcgaaaccatagattccttcgatgtgcctgccttaggcaacttacaaagacatgtcaattcgaacaggatcgcttttgggctgcagccattcccagaaactgattatcgacatatcaatggcgcctctttggagtatatgctagatttataccatgtctgatttaagactaaacttcactatcgggtgttttgtcttcgtgtcatttttatctacattcaagattctgattggtgaacttagaacgcgttttattggaactactccattgaggggcgacatttttttaactcagtaatcgtacattctccagtttttactcctttagtcccgatgccagcaacaatcaacgacatagttatatattgtaagccgggatatacatcggtttcctagtaggttgtatgtttcttgatcgtacttcagcaagtctaagtgttgctgttcctataagcattaagttgagggcagcaaccagtgagcctccgagagccaatcattccaaataaaatactacgttggtgacctagcgaagtgagagcaaaacagtactaggataaaagatattgcaccttaagcagtctcagtacctaaaaataacccctgcgtggaatagctttcagctagtggctttgccacctatagagcagactgagataatgaaaatgcatggtcgcgcaggagttgtggagaagcagcgcgccgcagcgtagttcgaaaacccctgtacttgccaatagtttctaagcgcagcatgcatgaatttgactacgtgtatgccttgggcgccagactaaaggttgggcagacaaataaatctctctacaactacatctgttcttcacgcggcatctacgtatggttagcattccgaccagcttcaatgttataaacatggttaaaaaaaattctattcggctttactgtcctgggtgtgagagggggaattttcggagtttggttggtgctagaaatcatttccaaaagaagcgtcactctctccagtgtcctatttgcgaaaaaatctttcaggatgagacggcgattatacaacattaccaaagctattataccaagacagcctcgccgggtagagcaaacgatgttcaccagatatcaccgccaagtgtactatcaagcgcagcggtgacacccgttgtgcggtcgatatctatgcccacagttgtccccgatgagccctcgagactcatcgagcagggaccggaaattccaggtggtcatttgttacatgatttactggcttctatgccagcactaaacatcaacgaaggccctatactaggtaaggaacctcgtatctacccactgagtaatccgaggcttatattcattccaacagaagctctaccatgtgttgcatctagcactgcggcttatccagcatatatggaccttctggagcaggatctcatcttgcgatatctacgttcgaggtgccattcatgcaatcgtcttgagacggaaggatatatcataggtcccacaaccatcagaaacaagaaaagcccacgcaaaggatcaattccaacctatcaatttcgagagacacctagcacggagctacaagctgcgggcactgtttgtgccatcgcccttgactgtgagatggtcggagtgagaaacggtcgccaaacactcgcttttctcagtgcgatcgactttttgaccggcgaagtgcttatcagtcgctatgtgaatccatccgaggaggtgcttgactggagatacaagttcactggcgtgacgcaggccattatgactagcgccgttgcctgtggtgcagcattcggaacctggcgagaggcacgcgataaattgtgggagtttatggacgattcgaccgtgttggttggtcattctctccagtacgatcttgaagtactaggcatatctcatgcaaaagttgttgattctgcgatattgactgctgagactgtctacccttccattccatcaacgaagccattgacccgcaactgggcgttgaaaacacttgcgaaggactttttgggcttgaacatacagactagcgattgcgggcatagtgctttagaagatgcatatgcagcacgagatgtcgtcatctggtgtatcaggaacccggaggatcttaaagtatgggcggaaaaagctcgactccaggaagagaacaagctcacacagagccgacaaaaatatgctaaaagcaagtccaagggcaagtttcctgccacccagtatactccaatttgggaacataatacagtattcgacgatgtccccgaagattttcgatggtgggattccgcggaggagtttgaatggtccaaaggatatgactcttggtctgattgatcctggaattgcgctcatggatttcctgaaatatgcaccatttttagtcattccttccctcctctgccactttactttatgtcgttgattgattttggaaccatttcccgagtgccaggcatcatccggtacatctgtcactatagcgacctatgtgtcgcgaacaatttatagctgtcaagattggccaatcctatctacgtaccatgagtgagcgctactattatttatttctcttatatagttaggaaaagtgaactaagacgagcgaaacctcgagggcggtgctagtgattgacgccttcaccgccaacttcgccgagtccggacctgagacgcgcagctgggaactcccgaatagttacaggcattacaatgattggcattcattcagagtacgtgcaagtcatacctcgctttcatgacctaccatactcttcagccaaaactcgacgaacttcccgatgatccggtccttgggattcttcaatttactttccaccccgaggtcgacgtcttcgacgcatcacagcgcgcatcaacactctggcagaagtctttacgctttgtttcgactatccctggttttcaaagactctattggtcatcagtgaacgatgtctcgccatgtcagcagattatcgtattgatccagtgggaaagcgtctttggctggaaactatttcagtattctcttggcttcagcatgatgttgggatatatctcccaagcctctaatcgttgcgtccaaattgatttgcacatcgaaattcctgactcatgtcacctcgaactgatctccttccagtttccagcagctctatctgcttctcagctagacgagaaatctggtttcgaagccaaatggggaagcgcgttttctagacccgtcaatggaaaagtttctagctctgaattagcttacgcctgtgggcaatggctccaaagagacaaagactcggaggaccagcttttcattggcctgctcttttggaactcaactccacaatttgacggccatctgcagcttcaagagggaggcagtcaagatctcacaaaacatatagcggagcttatcgaagatgcgatgcatatggtctcggcttgcacgggccagctcaatcacgtatcagatgatcctcttccagactccccgcagtgtcaaatcaagcatcaagcttttcaagcagatgtaaaaccagtatacagcgccaaacaagatcgaaatgagtctggtaaagataagtatcatgtggaaagtatgtcacaggcgcgaagaaccccccgggaacgtatagctgctgggcccgctagtgcatggtacatgatggcacacataactcagcatcatctaccccttgaaatcaactgttctgaggcggattgcattcaaatgatttctttccgtgcttagcgtggaaacacaaaggtgcagtgtcaacttgaagcacttcgtgcgaaattatggaaactaggagattgccccccactagcttggggtaaagaaaaagaaagtggaggggacagcgacaaattcttactattccttggtatgcttgccttctctgacatggcaaaatgaattcatatctaggtagcggggttgactccattatcgacaagtattgagaaccactatgtcgtcttcgaaaagccagatccctggatgatcaccgatatggcggaaagaaggagcgcgagaagccaatcgctccacagtcgatttttgatgtcccctgggctacttaaatataccctcacacgattttaacccttcttagacgtcaagaggcaggtcatgtttctctcctcattagagacgcttttgaggtgagaaaaacagtcggtctagtatagtgcacagtcagccgaatgtttaaatatatagtggtctttcaaacatatgcagccgctccgttaatagtcgcacttttatgtccctaaagaaatcaagacgattttagtccggtttgtgcatagtgaaagtgtcctaaaatctaatacctactacatctccgtcactccggattgctaaccgaagatgatcttagactccatgactgagcctactaggttgcgattgatctaatgctaatgacagtctccctgaagtagtgtcagcggaagacaagcgatggtacagtcctattattaatgcctccctcagttgtacttttggtagcttttaggttttctataaaggtatagatagatactcactccgctgagagttttcgttaaatgtacgaatctgccatatgaggatgaacaaaaggccccaaagataataataaaagtcccatcagtcagataatagggagaaaaaaaaagataacgaccaatgcaggattcgaacctacgatctcccgcaccggaaacggatgccttaccactaggccaattggccgccttgtgtagaagataatgagatatatgcataacaaagaagaacacaaaatacatccttataaccaacatacagtgcttatgtagatcgcggtctgtaaataccaaccaaaggttgaggtggagtttacatatatacgggcgctccgaccgatcattaccagtggcagtaaacaaatcgatgagatcccaagcaggaggcaggatgtctcccaggaacaaactacaaccccttaagcagggcgtattgcctaccaccaatcaaccacccggaaagaagctcgcgggattaaatgtccagggcagaagcactagcagtgcaggtcttggatcctacatcgtctcccacgattagccagggtcatcccttgcatagcagggaggtgaacccatgatcgacggggagatttgtcgaaatcaagcatcggtgcattcctgttgaaggagaaaagaatccagccacactgtcagagcggcgaaagaagctacaggattcgccgcgaggggtgttgatattggagcaggccgcgacaacaccccttcatatctcagttctgacagaatgcgaagacgatccgtgctagaacgattatagaaagtctgaaatcccccgaggtgactggcattccctcagacgttcattaatatcccttctttgttttttatttacaaatccagctccgtcgctcgccgacacttcctttctttcaccttgatacttgcgatacaggtctacagccgacacaatggttaagactacttacgccctcacactctttgcggccgtcagcttggcggcccccgttgcgcagcttaccgggcgtgccgaggcgcagggttcggttgagcacaagaatatcattggggatattcctcttcttggacctatgctcgcaggggtatgtgcttttagtcgataaagagtggaagcaaagaaactgacagcaatcgaacagaagcaggatgccaagcgcgatgagcaccataacctgatcgacgagcttccggttattggaaagcttcttggcaacgttagtttacccttctctctcgaatagagatagacaatagagtattaaccgagaccccctaataggacaagcagaaccagcgccgagatatcgggaaagatggtattagtggcctgccaatcatcggagggctgttcggaaaggtatgtatcttcagccagcagtcatttaagggacatgatattgacggaacactagcacacacacactggtggcgagaatggcatgaacaagcgccgaggcgtcgatcagaactatggccagaatgccgggcaaaatgagggcgagaacgcgggccagaacgcaggccagaactcaggtcagaacgctggtcagaatcagggacagaatgctggccaaaaccacgatgaaaacaaaggccagaacgagggccagaacggaggtcaaaatgccggtcagaacggaggaaaaggcttggaggacgaactggaaagcagcctcaggggtattcccatcgtcggaaatctcctcgtgaatgtatgacatgcgttatcaggcattgaagcagtccctagaaccaggaaaagaaagctgacctaacacaggaccaggataaacagaagagcggaacccctgccaagcagctcgatacccgccaggcgggccattccaagggaatcttcggtgtcctgcagtctttgactagcagtggtgtaagttctatcccaggccacacttttgaggtacacaagcgctaatagtccaaatagcccgttaccaagagccacaagcgcgccgaggagttggagcaactggactctgctgcgccgaatgcgaacgagactaagcaaggtgccaagaagacagctgcagaacaggcagcaaagccgagcgagagctccggcggcctcctcggcggattaatgggcaaggatggcctcggtgctctcaagggcaacgctcaccacggccttggccttttgcccgtatgtgccacctactagcagagaaacagctcaccaagctaaccttcgtttagatgcgtcgtgaccaagctcccatcgagggctccacccttgctggtgttcttctcgagggtggtgctttgggaaaagtaactaatttcctttctggtggtgctatgcccaagcctggttccagctccccttctaagatcggtgatggttctgttgcgggtccccctgaccctgcgtctggtgctggtcctcactctggccctggtcttgctggtgagcagaagcaggcctctggtgctgccttctgagtaagctatatgcggcacaattgcgtgtgttttagttcttctcgatcaaattgtgacgaggattttatgaaattagttcgttggactagtcgaccgacattggggatgtgcaatcggtaatgctattcagttgttcagtttttgagttgtcatttattcttccaaacaatgtcaaatgctttccttgattcgatcataaagcgaagcttcagtgtaaaaacacaggcaattttgaagtctgggcatagaaacccgcaggaaaacccaagccctgccacgtaatgagacagacagacgaagctgcaagaagcgcaagcaaaaatcaaagacaaaatcgttaatcgtagccaaatcaaaaccggggtttccggtccggaccacccagttaaagagcgcccttggggggtatcaggtcgttacacgcgatgaaatcaaaaacagccataccactcgagatggaaaaagatgctcggaaaggcgaatcgcagcctaatcagagtcatacatgtccacatcgtctactaccaccgtcgtgcccaacgcctccttcccttcgcggatcatcgcctgcaactgcttattcagtcgctggagactggcatcttcttctcgttccttgcggcgcatcttagcagcctgtcgctgtatatcggcagacacgggggcatccttcaaccgaggggatggcaggcccccctgtcccttagtaggcgagtggggtccgacggaatacgcagtccgtttagtgagccggggcataacagcggatttccgacgaggactcgatgcccgaaaagcgcgtcgtgtgcggagtgacgggctagcaagctcgctgcccgcgaatgcatccgagctcccggggaccaccacccagctcgggtcaacctcgtcgtctggatattgaccgggcactggtgtcgagcaaaacgtgctcgggctgtacatatctttctcggcggatgggctggttgggggcagccagctggattcgagagttgttgctgggctggatgacatgtcgtagccctggcctcctcctgcgtaaaaccctcggaatgcgcccgtccagcatagatcgaggactttgctcacggctttgatcacggtctggccccagcctgtgggtgtggtgctggggctgtcggggcctgcggatatgatgccagagtcacggcggctgcgcttgcgactgccgttgtagtctgctaggtttgctgactcgtcgctggaatcgaatgagggtgggaggaaggattcgcggtatcggtttggacggtaatctagctcagccgaagcgtgcaagtcgttgcctccgcttacgcttactgagcggtagttgggttggatcatcggagacccggtaaaattggactcattatgtgccgaatgtttctctgtgttacgacgtggtcgcttgcgactgaccgagagagaataaagcgacgtggaagccgttgaggctggcactttgaatagctgggagggtgcatttgagaggtcgagtctaggagagttgaagacagcgtgcatgtctggcattttgaatgaaagaagggataaagacaaaatagatccaagatcaaaagatcaaaagatcaaaagatcgaaatcggagaaaaaagaagaatttctgaagaagaaaaaaaaagcgagaggttggatgttggccgtggcggcaattagtgttttccttacaagtcacttctttgtctcgcactatttaaaccccctacatgacctcatatatcagatccatttggaaattacaatcgctggctggtccattgtattccagctgcctccaagccctcatcaccatcaactaacacacaccatccctcgctgccccgtcctccatcgcccgcaatcaccgcctcaaagtgactctgggcgtagtccagcacttcctcatcaaaggtgccaggttgcaaccagactgcagggatcccaaccgagtgcgcttccttcagcaactgaagggtcacaatcgggggagtcacaactgagagagaagtctgcgccggcgatggcaaaccggccggcgacgggactgtatcataagcacgcgaggggaggttgatttgcgctgctcgcggattcagcggtgtcaccggtagagagtgttcatgataccaggccaggactgtaattatttagttctctatccaaatgccaacagagcgtgttgccctactcttgtatccgaacttgtgagtgtcattgctggcccccgccaccgcaaagcggggggaagagaagaatcgcttgactgctgacattgtgctttaatgataatccggtagaaggaattgatttatgttcttgaagagtcagatagttttgttaagttggaaacggtagccaagtaggaaagttgcaggttgcaagttgcaggaaataagtcaagcgattgcaacctcggccgatgacgactatcccttcatctcccatctccgacattcggcgaacttccttatttctcatcttcacattcattcgtacaatttatgccaccatttctcccccgcaagcgcgtatcctccgaggacccgcccccggccaagcgccaggcccggcccgataattctcaagctcctccccaagctccccaagctccccaagctccccaagctccgttccacctctccgattccgactccgactccaactctttgagcgatgcacctgaaggtctcctcaaggaaaatgcctctgcgtccgaagaatccgaagatgaagaagaggatattgactgggaggatgcgatagacacaaagaccagcgtcactagacccgtcgcggccccggagctacaggacctagagttgactctggaccaaaatgagacacatgtgtctgatcttctggagggtaagaaagggcctagtaaaattgagcgccaaatccgaatccagacgcactgtatgcatgtccaatgcttgcttttccacaacgccattcgcaattcctggagcaacgattcgaaagtgcatgagatcctgcgcaaaaagctaccggaagggattcagaaggaagtcaagaaatggcgtatagcgtcgggcctagaacttccagagccgaaacccgaaccgaagagtaaaaagaaaggcaaaaaggccaagaagaataaagactggagtgatgagtccgagcgactggaaccaggccagccggatatgagccgtggtgatccaattatcatattgatgaaggtgctggtcgcatactggaggaaacagtttcgtatcacggcgccaggattgcgaaagtatggatatcggccggtatctgcccttgaaactgcaatcaccgacttccgcgaggaggagcatgacccggagcgtcatggtgagcgtatcgccaacctggatgagttccgcgcgaccgccgagcgtatgcagggctcgcgggacgtcggcgcacagctcttcacggctctcgttcgtgctctaggcattgaggccagactggtggctagtctacaaccgctgggctttggctggaccaaaggagagacctacacacctctcacaccttccaaggcagataaggaccccggggatgaagaggagtcggaaggatccgagcctgagactgacgctgaaaacaaagtaccagcgaagaagcgtaagcaaatcgatgcggatctgccatttcctatctattggaccgaagttgcctcgcccgtcacgaatgagatcatatctgtcgacccgcttgtgctttccaaccccgtggcgccatttgcagatacagatctacaagcaaacttcgaaccacgcggtgcaaaagcagaccgggccaaacaagtcatatgctatgttgtagcccactcgtccgatggtactgctaaagaggtcacaacaagatacctccgacggcggacctggcctggtaaaacaaaaggcttccgaatgcccttggaaaaagtacccgtaggccagcgcgggcactacattgcctttgactggttcgggatggtaatgcgcgggtaccagcgagcccgcaagagcaaaaccgcagtcgacaaactcgaagaaacccgagatttacaacctaaccaacccgaaaagaagaaaacagctcaaacagccgatactctccaaagcctccggacctccaccgagttcgtgctagagcgcttcctccgccgcgaagaagccctccgccccggcgccgagcccgtccgaaccttcatcgctggaaaaggcgtgcgggccaaagaagaacccgtcttccgacgagcagacgtgctaaaatgcctgtccgctgaaagctggcacaaagaaggccgcaagccgagaccgggcgcggtagcgctcaagcgcgtgcccatccgcgccgtgaccctcatacgcaaacgtgaagtcgacgaactgcaccgccagaccggcgagaaacccctacagggtttgtacgcacgcgaccagacagagtacatcatcccgccgcctattcaggacggccgcatccccaagaacgaatatggtaacattgactgtttcgtgccgagtatggtgcccgagggcgcggcccatgtccccttacctggtaccgtgcgagtatgcaagaagcttggaattgactatgcggaggcagtgacggggttcgagtttgggtcaaagatggctgtaccggttattcagggtgttgttgttgcggccgagaacgagggtttacttagggatgcttggaaggttgaagctgaggagaagaggaagagggaggagctgaaggcagagaagaagatcctgcagacgtggaggaagtttctatttgggttacggattatggagcgggtgagagatgagtatggaggtggagatccagatgctgatcgggagcgcgattcgcataatcccttcgctgtggagaagaaaaagcgggaggaggaatcggaagatgatggcgatcaagaaatgcctgacagggagtcgtcatataacgcgattgatcatggtggtggctttcttcttcctggtcatgaagatgccgcagacgatgggttgatcgtcgagcaccatgatcagcagcagagtcctgcaggtccgtctcacaccgattatgacccggatgacaacgagccattcgaatctggacctccttcggagtccccgccggtgtctatctcatcgggttcagataacgaggtggataataatggcgaggaggaagcagaacctgaatacgttcctcgctcgacacgacgaacgcgaggtcgttaatggaatcaatgtatgtacgcaccatccatattgctggggttgggttgtgtttctactccgtacgaactggtcggaatgccttcccatgcaaatagattttgtcacagaattcgaggatactcccaccaaagcaagtctattttacgttggagatctcagatatagtcatacgactacttttccaatgttcattacgactaaatatgccaccagatcataactctcttattggaaactgccttaccgtctctattaccaccttcacgaacgctagttctttcattcgcaagaccatatggcttttacactgtagtagcccgtaattcatcctaccttgaaactagcaaacttttcaagtcgcttggcttggtatacatagcatagaaatcaaataaatcaaattgttaaaaatacggagcgcaacaaaaatagttaactcggggtcaaatattccctactatccaaccatcgtctgatcccagcctagggtcacgttaggaaagagtgcaaagccatacatggatagctcctattcggatatcgcccgatacataattccacaccaattggccaagacgttcttccttccgcctttttggctgagatcaaaccagggcaacgagctcacatataacatatgtgtaggtgtgggaccatcaaaagtctccatatactcataactgatttccaaatggaggaaacacatgtagtgctgtgtcgcatggatgattacaacactgccgaggtcgttagtacatagttcgaatgaataatgttcatagcgaagacattgaggctttcgatgtgtaggaatctcactctttgtcagtgttgctggctctggtcaccagcccttcgcaaaccatctgtgcaaggcttttatcggagataacaggtttctcatttcgaagactctggaattgcgtcttcgcttccaatatcgcgacatgattgtctacaagcataaaacctccgtctgatttttggcgtcgcaaacaaaggccaccatcgtcaatggccactatccgccggcggttagttattgtagtggcggcaacccgtgtcttagcgtctcggaactcgacaatagtggaccttggcgctggatgttgaggggagcgaagtataagatatgtctaatcacacatgacgcaagtcgcagagtgtcatcttctggtgttataccttgatgctgtgcatcaaggtcgagatatcctaaagatgaatcttcggaactgtgtgagctacggctactatgcgtggagccaatctggatttcgccggaattggtgaagtctgactggtctatttctcgtctgacacgcgaggactgccttcttgcaagctcgttctcatttccttcctgggtaatagataggccctgcacgcgccggtcttggttccctttgaattgggccattgctgcccagatttgtccttcagcgattccgttaccagaatttagcaccaagttgtgctcactgccagccagaagtgccaggtcgggtccttccaagaacgatgtaatttcattcgggaaaggcggcattgtcgaaggcatatatcctgataggatgggaagcagattgtgcaacggctcacgcctgaccacgcgacatgcgagcaaatgagcccgaccccaggaactggcagccacatgattcagctctgaaaaggtctttctatttttggcttgaaagcgagctctgaaggtggattcggaggtgacactgctgaaataaagagtggtagacatatttactaagtggatgtgtgagaggtttgaagaaaattgtcattttcccccgctagatgaagaaaaaggcctcgcagttgctgcctaatgcgtagcagcctaggcagagttgcgcctaacctgcccatgcctacaagttgattcgtccgattataccctgtcatcttgtctaggagcacactagacaaccagggttgtttggtgaaggcggtcagagggggttctattaggcggtgacactgtccctggcattatttccatcatcacccttgtcatcaatgctaacaatggtagctgattctgggccacagtcctttcgggatctcgtgcgaaaccataatcgctttcgctttcttgtaggtcctctacagtggacctcgtatcatctcgatctggcggggtgtcgattcgaagatgtcgcaactcccctgtctctgtcacgcttgtctctacagattattctcattacgagaagggtccacgacatcgtattcactgggatgaaattaacgatcctgaagtcttggctattggtccgcaacctgagatgaagcgtgagcgtctgatcaaaatcttggtaggcaaggattgcccatttgcacatactaggtgggagctacaggctggtagtatgaccaatatacccggggtaactgacaacttcaccgagcagcaagggacctcctttcttttttgatcgtcggtctattcaccggccagaatatctcatgtttcataacagtcaagaatcgatcgaggatccctcacgctcattattgggctatgtgcactacacatttgtcaatggatctcgcaatcggcaatatcgtccagctccagggggacgtagcaacgagatcggttggagaatccatctaaagcggaaagctcggacaactccaaaggaatggaccgacgatccatattttgtgtgtcatttgttggctcttgcgcagctaaaagaccgcaaccgcaccgtcaatccatcaaaaccaatcacttacactgtatgttctgtatgcttacattttattggtctatcgcgtcccagctaatttgctccagtcacgtcttctcgcgactcacatacatgaaaaacattttatcatactatatgaggcccagatcacttccgaggtcctgaatgcgctcagtcattggagggatgcaacaacccccatccaatggcctacaattaagcgcaaaagaatcccatatcagccttatgatacgtttgctagccggcttatagcggagataagggaatctaggccttccgacagtctgtcaaatatatcagatggtgtggatagtgtggatgagcacggtggggaacggccatacgaaccagaagatagcgggtcatccaagatgatgaggacttcaaaagaggcgggtctataaggagacctgggggtagcaaattcatcggcataatggactttcttcggatggacaattttgggggcgtttcaggggcgttgtatcaatatttttcatgttctgagcatgagtgatgactatgtagtattctttcaaacagctaacctgtgtttattcttgatacatgactctctcgttcacaaagtttgcataccttgtcaatccttagcacatttttcataacacatttcatcctaaacaatcaagtagttattgcgaagagcttgttgatggtattgatttccgagtaactaaggcacttcatcaaaaaaaaaaatatgataaactatcacaacctcggtatgaagatcaaagcaaaacgatcaaataccgtgatagccaagataaaacaaagctaattaaggacatggctcattcaccaaagccgagagacaagcgtccaccgccccatttaagcagccgtagtcgaggaactcgaggaactcgaggaactgccagaggaagcaccgtcgtcgggaggggccccactaccaccaccggcaccagcattctcattctcaacaccaccgtcctcagtataataagccgcaggggtaacagtggtatcctgtgtagggtccaaaccaacagtgatccaagcgaagattccctcggagatatcgtcgcccagatagatgtattccatgaaggggtcaatgacgtcgagctcttcgccgagaatgctgtcgtcggcgttggtggtcacttcctgtgtgttggttgagtaaggggcgacttcgtcggcggcggtgatgagatcctggtcaaagaagatctgtccgacgtgcgatgaatgagtggtgtagaggccggagatggtgccgttggcgaggactctggtttcgttggctgggtgggcgagaactatgtgtttgttagtattggaattggcttaactaaggggaattgtgtataccgtggatgtgagttgcccggccagtgtaatgacctgggaaggttgtttggaactgaacgacaccgtccctgttactcttctggatacctcggttgaaggtcgtgtcgaggttggtggaatcgttggagtttccgtttccgctggcgacgactccagaatagacaccctatgatgatcgtgtaagtgaaaggttcgtattgtatgtgatatcggggatgcagtatacttacagtggagttgcagtgccacaagtccgtgtagagctgcggaatgggttcgcaggtgttggtgttgatcagctggatgtccaggtagagaggaataccttcctgggactcggcgatgttcttacgaacgagctcaccggtgacatctaaaccgaaacagcgtgagtaagattcaatcacaagaaagatgggaagctaacagtagggtccctgtgtcacctccggtccgagaatgcatgtcgcctcggcgccaaacaacacttcgggatcggtcgaataatccacactcgtgagattggagtgatgcgaggtatccagggcgtcatcggagcgcgccttgaggaagtggttggctatgggtcgttagaacgtggtagtatgttgaagacttcaaaacacaaaacatactatgctgaagaccaaggcggcgacgtatgttcttcacggatgtgtgacgacgggccacgtttcggctttggtggcctcgacgctggagatgagaggtacactgcgcaagactgcgcgagtgaacagaggcctctttcaagaacgcagctcgctcggcggcttcggctttgacatcatgtcccgggtgagcggagacaatgccggtcagagcagtcaggccgacggcaacaatggaagcgagatgaaccatgattgcgttatcgaggcagttgaaggtgaatgagaatgaggaagttgaggataccacagatgggtgtcctggggtgttttataccccttcctgttgcctccctggctaataccaaggcggagcatggctagattcaggatatacccgcttcaggtaaaacaacattttgatgaagctgacgagggatatggcgcagtactgggtccgcattgacaaatgaaacgctgcaagtttctcatcgagaaagagatctaggtaactgcggccccctcagcggagctccgattggattccgatgctacatggcgacaggctgcaattgcgtgccgttgataggacatgcgtagactgtgaaagaggcagatgtttagttcggcactaactctaacccgctgatgaatccaccgtcgatcatcctggaactattgccctgccaaggaggaaatcagccagtgaggatttcgcaatttatcatgcggggaattaaggacgcggccctatgatgatcttctttcagtcttcgtcgcagggtgcagatgtatacgtattcggtcttggcggtcccgtcccggggtcccctgcgagatcagtcagcggagaaaggagcgccgatagctttggctgcatatttgtgcgaaagatcaacaatgaacttgtcggactccgagattgctgccggaaagcgtcggatttggatgcatgcaagacaagacacatgtgccaagctttgccttctaaagaatgcatttcccgttatacttgagctgttcggaccttgaatcttgccaaggcgatgacataattccggaaaggcttggcgattgcttgctctccgaagatctaccgatggctgagtgtggctggtggataaatgtgggttccaaccctatgttgagaatacggagtagctcaactggggtattatcaataattcctatgtcaaaatggtcagtatcaagtataaataggttggtgcctaggtgcatggtagaaggagagaatggaaggactattcgttggttaagtatcaaagtaagtgtagtaggaataaggacacccagtggcctagttggtaactctatcgagcagcacctgctctagacaaccctctaggtcaactgcctggtttagaacactgtcgagaattacgcactcacggctctgggttcaaaccgtttgtccacttttttttaatccttttttttttctcgttccctatattagttcctgaagtatcaagaagtaaaaaaccagcaaacagccgttgtttaagtatcaaagtcaatgtaatagtagcgaaccccagtggcctagtcgatcatgagccatacctgctctaaatcactctctaggtcaactacctgagtttgaatctcctagaccgcgagtcgctgtcgagaacttcgcactcttgttcttttttttccagtatcagtttccgacaaaccttagccttgaaagcatacaggtatgcgatagttaaataatgcctacgaggattaagagaaaaattgtatcaaaaactatcagaattaattccatcatgttaaatgcatattcgtagatattgaagcaatatcgcgttaaaccgtcagctcatgatagagaaataactgaagcaaggccagccaagagggctgggacaacgtaaatggtaggaaacaagagaaccactacgcagaaacagtccgatggattaaacctcctgctgactcacggtagggttaatcttctcgtccaatccaatttcggcagcaaaggtgctgtgaggctgccacttggaggaagtacgaggagtagtctcttccatcatcttgtcaacctgctcaagggtcagacccttggtctcgggaatgaggaagtaggtgtagacaaaggcgcaggtacacagcgaaccccagatgaagaacaccttggcacccaggttacccttgtcggcatccgtcatgtaaggagtgatgactgcgatgatgcagttccagagccagttggaggcggcggagagggcaacgccgcgggatcggataggcagagggaagatttcaccgatgacgacccaagcgccggggccccaggtgctggcaaagaagaagatgtagatgcaaatgaaagcgatcattgcactgacggccttggggttgttgccatcggtaacaccaataatggcgacaatgaactggcacacaaccatacccagggcaccccagaggagcaaaggacgacgaccgtatctctcgatggcgtagaaggagagcggagtggagaagacattgacaatagtggtgatcatgctgatcaggaaggggtccttgattgtgccgagttccttgaagaaagtggttccgaagtagaaaatgaagttgacaccagtccacctatggatcattagttcctgttcaataccagggggaaggtgagacatactgctgcatcatctgtagcgaagtacccaggatagtacgacgaaggttgctattagggtgccaaaggcttccagtgaagcagttgaaccaggtgacgaagtatccaccctgggggattaccaaaagttcgtactggttgttggcgtcgatctcattcagctccatctcgacaaagtccgaatcttctggctggccacggatacgagccagtacaacgcgagccttatccttctgacccttgcggataaagaatcgaggggattcaggcagcaggaacaatccaaaggccaagataacagcccagagcatttggaggccaatggggatccggtacgacccactgtctgtacggttttgggtaccatagttcacgcacgaggctagcatcaaaccaatggtgatgcagaactggtaacccgagacaagagcaccacggaccttgcggggtgcaatctcagacatgtagagaatgatgatagccgagacaaatccgataccgaaaccggaaatgagacgaccggcaacgagaagcccaatgctggttgaagcggtctgtaggatgacaccgacgatgaagatagcgcagccagcgatgatagtaacccgacgaccgaaccaatcagccagatcacccgcgatgagcgcaccgaagaaggttccagcggagagaatggagacaatgagcgactttcgggaggacgggatgacgaattgtgctgcatcagtagtagcaggatcctagtcggttagtgggatactagtaacttggagacattgacactcacgaggccttcaaactcttggatgaagtagtccatgccgagaacaccgctgatgtaaccagagtcataaccgaagaagataccaccaaaggcagcaaaggcacacattaagtaggccttgaatgtgaccggggcctcgacgcgcgtggcgtcgatgggcccagagatgactgctccacctggcatggtagcaagtcgataagagtagatgtggttaagatatctagaaagagatgaagtgggatgtttcaaaataagataatgtgagatgagaggtgggaagaagaagaggaaaggaagggattgggaaggaagagagaatttatattctggggaagacagctacttgagctccaaccccggacctacccccatgtctgaaaaaaaaaacacaaacaaaccaaaacactacagggaaacattaaaaaccagtccaatccacatttggtttgggtgctgcataaaataccagaaatctagaaatcggctggaatgacctgtgtagccaagtcggctctggaagttgaccacgcgatcgaaacggcaagtatagaaaaccggggaagtgttgcacggcctaagccgtaaacctgtcagattggaggctctgattggctggaatccccagaaatgatccgccgatccccccagggctggacaagtgaaaaatacccacaaaacacactaaaaacattaaaaaacataaaaaaacaccttccaaacgtccaaaaccaaacagagccgcgcgtggaaactttgaacccccggagatgtccactttgggacaatgggcccggggaaataaactctaattggctggctttcatgggacaataccccacgtgccccgcaaatactttttgtactgtgactcttacatctgggcagtcaacgggtaactatctactaagttattttactcatttactacctgggtaatactactctctgcaacattagacaatgaaaagatggcttagttatgagcccgggtgactggaaaggactgcagttcacagttcaaactactaaataaaacttaactatatccaagtcaatgtcacatcgatggcaagccatccaaagcacagacccaatggacgccacacaatcccactctccactttaccttaaaggaaaaaaagtcttggcgtcaggcaagctgactatgcaaggatggcggtgtatacagtaagatacagcacgttacaagaatgttaggcttactgctttacaatccaaagggggtatgttcctagccatgtctagaaagaagcaaaacaaaaacaagaccatgctcaacatagtcgaagtgccagctcgtctatcaaacataagattcccgaggacagaaatgggcttttgaggctttcgcccacggggaaaccaaccagttacacgtgggagactatacctgtttcagttctcatctccgcattctggcttggctatcacgtgaagtcggttttagtctgaatgagcgggctattgtcgggacttcgtgctggtccattagctgcctcgcgttgtctcaatggcgcacttgatcgtggcatgctattcgatatcacaaactgtgactctactaaacaaactctcccctgctacccaccaaactctggaatggctaaatacagccaatgctacctcgtgctcgtactcggcttacggggtacagagttgatagacaacttgccatatgttgtctttgaaatggcatgagtgacccactttggacatacgatggagacggaagttggatggtgaactaggattctccgaccgaaaaaatgagaaaacagaggaagccgaggaagaatctccgatgccggtgaacactttccgtaatgggcggtttgtgtttcacttgaggggaaaatgtccatgcacgagatcgagtccggagtaagacgtacctatgccctactccatactcattgaggatatgcagatttttcggatctagcggcttcgggttagtcgcctgggcacgtatagatctggtatgttattacctacgtacatcaatatcctctttgggattctgatacatggcctcgaccatgattcgtggactcccgttttttcccttggtcgaatctgacaccttttggctaccaattgcattttgattgtcctacgttgtactcgttcagggatctctagtcggttgcacctgcgtcaagactcgattcctacagaaacaggtaccaggtacaatcttcattcccaataaacgaaactctccgtgtgaacatgccaaaactacgcgccatgtcgggcctgaatatcaagcccggccaacccgcccgtctgccgccaatcttcaatctccttcacataactcttaatcccctctccccagatactgaactgcgccgcccgcaaggcttcaccgtcgtcaaattggagtccctcccgattgaagtaccccggagtgcaatccatcacacctctgagcgctcgggctctcatcaaaaccttcgaagtccattcctcttcggagcgacagtccggctcaatagtaagcccgggcacggtgacatctgggtttcgctccgagatcaacttgccggcttccgaaatgatgtaggcgacatgaacggcaagctgatcgagaacatagacctggttcgctgatgctcctgcttgatacggacctgggaagaacagattgggaaacccattggtcattactccatggagtgaagtcatgcccttctgccatttttccggcaggatctggttgtcacgtccggtgacggtcatagccccgcgatcggcactacccccaagactgtagccggttccgaaaatgatggtgtccaggtcatactcttggccctctaccaagatgcctttctctgtcacagtccggatcccttttccgttcgtgtccaccagggaaacgtcgggccggttgaatgccgggagaaagttgtcgctgaagcatggccgcttgcaccatccaggataccacggcttcaaagcactagcagtagcgggatcggccacagtggtttccacgcgatggcggatcgcctcttggcgttgcaagtccaattgatgcatccgcgttaggtagtccgggtcaagaccggagggactgccgatcagtacaccgagggactgcatcttggtccaaccatcatcgacaaggtcaacatctgggaggggactctcgttcgagcagaaggcattgaaattctccatgcgctttcgttgccaaccggggcctcctttgatcagtttcgcccaccaggtgcgatcggtgaggtgattgtaacgcgaatccacagaagacggtgtgcgctgaaagacaatcaatttctttgcccacccggcaaggtgtgggatcacctggacggcagatgcgcccgttccgacaaatccaactgtcttgtctcgtagtccatccatcatcgggctgtctggacttccgccggtgtaatcatagtcccagcgcgaggtgtggaaaaccttcccctcgaacgtctcaagcccgtccaatttcggtatcttcggtgaactcagcaacccagtagccaagataacaaaatcagactgtatcgcagtggatcgctggccacgaggtttaatattgacagtccattgagaatcccgctcattccaaaccaagttatcgacctcggtctggaacaaagcccgctggctgagcttccattgactggcaatgcgcttcgcgtgtcgcctcaattccgacccgctgacatacttatgcggcggcatgtacttcgtttcctctagcaagggcatgtaagtgtagctctcgacatcgcagaccaagccggggtatttgttccaccaccacgttcctccaaagccacctgctgcatccacgaagaggatttcactcgcacggaggaatccagattggagcagtcgcactgcgaatagcagacctccgaacccagcaccgacgatgaggactcgggtttgcctctgctggagcatatcggtgttgacgacgatgaattcgttcaagtaggcggggtcatcggtcaagtcaacatattgggttggtccgtcagggcgtaggcgtttcttacgttctgcatcatactggtcttgtatattctgcagatcgtcgcttgtctcagctatactggctatgttggtggtaggttgatcaggaacaggaggcgctaggccaaccacagatttctcggacatcatgacaaggtgatggaaaataaatctctacatgtaaccgagcaagacgaatagggggttataaatgccatcgagagcttcaaacagatacaagatgtttagcaatcggttgtgttgatagtttctagcaaacggaaagcagagcaaacgaagaaaaagaactgggcgtatttaggagatacatacgtattacgtataataagtaagctatagttaaattccgaacgcaaggggccatacagacccgtttggaactcaatccaagagctacgctgaaccctcgtgcatattaaaatgggaccggctgtggattcaccgtgataggtagggtatagggatagactgtaacaagccgcagcgagaaggcgtccgcactgtgcctcgtttactctagcacttcagaaccagagggtagaatgttattactgcggactgtaaattataggacgttaatgttatctgagccaaaacgaaaataaatgtgattggatgttatctgatattagcaatttggacccaggcctacattctcctccttagctggtcaaaggttcctcgaactcaatctacatcccagtggtttgcatgctcagtgttggactggggtagtagtgtcctccgcggttcctcagggataccattctcaccgtccccttcgtcctgcacctccggttgtaaaatacgctgataaccagacctcctgttgacagatcctgtgctcatccaactcatccgatgactggaaatccgaacgaaagcaatctgtacaaagtcgcagaatattagccactacaccacaacacaaatctcactatatcgtatgcagaaacccaccttagccgcgagaacaaaaacagccgccgcaaaaaccatccaagacgtccgctgctggtactccctccacggggcaaagcaactcctctgatatcccaactgcaactcacacgcattgtccccgtgggtgcggtccttgaaaggccatgccctgtcgtgaatacttctgagaccacagcattggagctcatcctggattgaccggatagcctgtgagttcttcgacttgaaaaacccctgccattgttgctccaggttacaagagaggatcctatcggggaagaggtacgcgagtgctaatgtggccacgatggtcgatatggctgtttgggcgtgattgagtatacccgatattgtgttccattgatgattgtgagctgtgtcgttgtttaaacgtgtaaaaaggattcgtgtggctatcagtgtgagtattgtggtcggggaatttaaggtcgcgagggctggaacccatgttggcaaagggagaagcaatgcggaggtgcgagcccaagataacctattccgatgttagttattctcgttgattacatgctagttggagatatgatgaagaaggtagtaactcacgctccaaggaccaaggagatggtcactccctagtggtgaggtttgtcaatagaggtcatcgccaggctggtattcaatatcttaccgcaatgaaaatgacatagagaagaacggttgtatctaacttgaccggcattattgtatatttagtcagatgttttagtcgatgcttgattgaaagaagaagaagaagaagtggacgacatgggcggggtaggaagcggtatagctacagagcataagtaccttatttgaggtaccttgcttttcaggaagaatgtgcttcatctcctttctattgagagtttgaaagtgatatcttattcttttacttgttgcagtctccgcaaatttgggcaacagtagtaacacgaatcgatgttctattacttaaatcctcgatgctatgtcaaccctatagtgcagacatcatatatcccacaggcgagtaattgatagcgatagtgcatgatcttcgtaagccactaccaggcctaagcccgaccagcaagttccttttcgtgcatgggctggacctcctctatcgtaggcacagtatccaatgcgtcgaggatgtcagcgcgaggaccggtgaagttctttcttccatccacaaaccactggaacacggagatgatgataataacagcaaatgctgcaatgcagtagtctatatagaaaggttagtacgaaaaatgtcatagataacctcgcaggttactcactcatactgcttcccgtgaccgtgcttgacggagggaagacgaaaaggacggtagtcaaagcgatatatgataaagcgacctaatcatgattagagatgttcggcttcattcaaattccctggcaacatacaatgtcgacaaaccatccaactgcattaggcaatttccattttctttccgggagcgatttgcgcccctgaagacagttgatggcaatagggattccgtaggacaggtcaagagccacgaccgaggcagagataattgcgttgaacgcactagactctgttagttactattgcgctatcgtgggtgatgatgattaccttgaagagccgaggaagatgcatccgaatgcaatgaccacaacaacactaagaatgagtgcgttgaggggcaatttgagtgttgggtggacctttgcaaagaaccgagaggcaggaaggcctccatctctgtgaagagtcagtatacgcattgtatgccaggaagaatatcaaataccttgcaaatgcaaagatcattcggctactggtggtcatgacgctgattatagcaaagaccaagcagaccaggggcaacctataacctcacgtcagtggaagcacaacaggggaaattttcaccacgtacatcaaaaggcagataccacccgcgttgctcttggtcgcatcgatgaggatctgcagaagaggaccggctgcggaggatgcgaccgtttgcatgtttcctgcgacgaatagaaggacgatcaaaaagatacaaccggtgaagactccgatacccacgcaggtaaccatgattttcggtccctcgatgtcggcattgggcacctctagaaacgcgtgtcagtccctctccctaacttctcaaacccagagtaatctttaccttcgatcatgtgtgccacagcatcctagatagtgttagttgaattggtttagtatcgcaatgaccatgacttacaaaggcagtaacgccaagccctccttgaagcaactggatatatgttagtatcattgcatcgttacaatggatgcagtaaacatacacctagaagccatgcgactccatcaggccctaagctgaattagcaaaatcatcataatagagttatcggggagcatacagccggttgtattgacaaagtcacagaacacgaagctgtggatgtcagtagtctgtcataacttgatactgctgaggatctcatactaagctgtgttgtagttgggagaagcgcatgcgagacatgtaattgacacaatcacaaaccctccaatcgaccacatgactacatatattgttagcgatagcaagtcaagctgggagaggtaacccacaagcaccgcggtaaatgagcggcaagatggagttcatgaaggcattgatgatgaaggaaccgacggtcaatccaacgtagatgaggaattgatgccagcgttgtgggacatagctctgcatatcatgttagcattgtaggaagagtatggagtgagcctctaacctcatgaagaaccgagatgatgccgacaataagttgactggagagaagggagttcgtagcgacgagtgcaacctggttgtgtgttaggttgagtaccacattgaatgattgccttgcctacccagcctgccacattgatccagcctgtaacccatgataggattgggactgtgctcggccacgcgacttcgattcgttagtatgaagtatgacgaggtataggaggggaacatactggctagtaacagagttagggttagtccaggtcatatagcataaagggtctgtagggataggatgactcacctgctacccaatgatattgtccaccggctctgcaaaaggatcagctggtaatataccaaaaggggacatgccggagcttacgtaggatatgccgaaagaaattcagccaacgaacatgcgatacaaagattgcagaatcctgcagtaaccagtcctggatgcgtgtcagcgaggtagaaaccaagtatttctaaccaacgtaccccaaatcacactggtacttccaccagatgtaagactgatcgacaaactggccgaaagcgcagtccacgactagcttggttagccaaatatcccggtcgcaatccaggtctgacatacattaagaaccgcaaaggccagaccaagcatcgacctagagagtcctgtcagtatcaagcctgcatatgctagcgcatcccttaccatgtcgaatgactacgttggagttcaggcttatggcccaaagccgccaacttggcatcatcgccttggagtgaatcgtccttcatactggataccggtttccgacgtgaatatttacaaatctaagaactgaggagaagacgatcgctctaagtacgtcccccgttcacacgtatcaggaaggcattgccagacgggttctctttacggttaagctccgataggggattgactattccatatgcggggaagctgtgtagctgcaaagtatcttatcgaggaggcttgacaggcttgggaggcttatcaagagagtttatacgctaggctgctagtcgatgtcgcatggacttgcccaacatcgtatagtctcgccaccggcaattaaaacaacggcaaaattgggcctttaaattaattcttccattcaatcgagggagcttagtaaaatataatgcatcatattgtacaatccaatttcgagatgtcaacgttaagttgctatcttgcaggaatcaggtccccgccttaattaattaattaaatctcaaatagaacataatgccacgtgactatgtttgcttatttgctatatctttatcaactgcttcatcattaaggggctaaatccaatgggaatcaggtagaattacctaccatggagtgccgtttaggcccgtgtgtttgagttaaagcctgctccgttttcttttttttataaatccacctatacttatttctacctactaaagagggaaccctgcaacggggacagtaggggcaccgacatctctgcctgcaaaacaggtgtgagaggagagttatcactgggagttgtagggtgctagagaggagaacaccatggggtgactactgagaagtgaattggaaaggtgtctgcctctcacatggccgcttaatcgtcctacactggaaacccccactgcactacatatgtagtccgcttacaggaatccagcaagaatgataatttcaagtggaccgagcgacctgtgtctgattgtacagctgaatgatgggtttggtgccactattacattagctgaaaatgtcgagagcaagactggttggacggaccgaagacggtgcgatgaatgtggagtcgatgaaggtattgcccagcgtgaggatgcctcaaaggtgtaacgatgaggctcacagatccccccgctgagtgtagaaggtcgatcagaagatgtatgtttttggtaagaaaacagtggcagcatgctgttgaaggcttatcgcgtctttggaaggatccacagggagcagatcaggaaaagcagccttgattgatataaaagaagagaagctagagaagcagagatctgggagaaatggaagaggcagggtcaccttcattaccctcaccttcatttaccttcatccttactgttacgattcactcgtcatactcctgtttgcctatttgcttgattgcttgttcgctagttcgcattagctagattgttcgctagatagaagtttgcattgtttgtaaaggggatagctatattaactagctgctttctactttacaatttgcttcttctttctccctatcttagttatttcgaagttatttcgagtagaatgcactctgcttcctttgcaagatctggcacgtcacacttaccttcatccttaccttcatcaccaattcttcatcgacctttaccagccttgccatcgtttttgctagatagctaggtatctatgtgtcgtcgtagtaaagtttacagacaggcacgcccgccacctccttttgaagaagataaggcccaagtgcaagctacctagggtgtcctttgcctagattgtcgtcaattcaagcttcgatcacatagctgtgacccagtttgccaaacctgcggcgatcattttaccccacagactggctgtccagatttgtgtgatgctgctccctgctgtggctgttgcattaagaaacttattgatgaatcgtctgaatcttttgtgatcggcgccaacgggttgccagtccagaaggtatagttatcttgctacttgtaagtagttcatacccactaatgggatttttcttcttttaggttattttccctcatttacgacccatcattgaaatacttctcgacttattctttcagagtagaccttagaggttgattttatccgtgccccctactataccttagtcaaatctgtcggaggcgtagacgcctttacggatatggtatacaatacgattttaccaggaatcagggcttcttagggcaatctttttaccatggaattgtacgttatgctatcttgcgtttcatctctctattgtggatttattctaattgccctaaacaaaaaataccccgcacatttatgataacgaagtattaggttatatatatagagtggatagttatcgagatatcacctagttgtagatatatatttcagtattttctataatcggagagaggaatgtccagccgagagtcagccctacattgttaagggacggccttgaagaaatgcaatgtacaacatacatttaataatatttggtgattgcaaagttacttcaaatgaggttataaatgtacatgatcaacctgatagcaataactccagatatgcctattctcagcgcatatagtgccttggaatccaccaaatgccaaatccgatcccaggtcccaaatccaaatcccaaactccattcaaacccaaatcgcaaatcgagcagaaaagtacatcctccagtggttcaagacgaccagcatcttgaagtacgatcttgaagtacgaatccgatgttcaatgtatcatcgagaatacgtgtcgagtgcatgttggagttcatgcaaactattcttgtcgccgtacgcgtccatcaactgttggtttcgagccaggcgctgctcttcctctagcagagcttgttcccgacgtaacttggcagcgacgtaataattgtatgctccaaaccctgcacgtgccatagttagtatggcccacaccaccccggaagaatacgcattgaacataccgagaccaattgtggccatgaaaggaatcaggctaaagtaaagcgagtcagtaaaccatcccaaaagagaaaaaaggggcggcataacgtacagccgcccattccgaggcttaaaagtggttctggttgggtttccgtatggtttgttcgcaccggggagagcaaattgagacaacatggtatatattttgtatgtcgatgttcctgggggagtatagtttggatattcaggagtatggaagtgaaaaagggaaaaaagtaaagaaaccaaggagtaaaggagcaatagagcgaaagccggcttaatggggtaacggaagagacggattgcggggaataatgacgttaagtgccgaggatcgcttcttataccgccagccctcttataccgccaggggaggggagatcatgccacgtccactgatcatcatcatacaattgtgtggtgttgtctagagcaaaagtcctacgacttggagtatgttacattgaaatcatatcataattgaatcatcgtgtcgtgtgttacctgcattcggaaaagatcaaacccgcctcgtcagtgtctcgcctataattgattgttaactgcataaattccatttgccgaagaatcatatgagaccgacggcctgaagcctgatcgtccaagtgccttaattgccgtttaattgccattgttctgaggggcaggagttgccggaccctccggggtcacataagcctaggataattcgtcagcgcaatccggggaaattaccccatacggagcatttaccttggtcattccaccatcgactacaaagtccgttccgttcacgaagctgctctcgtcgctggccaggaaaaccacagcgtgagcctgctcaatgggttcaccaaaccgaccggtggggaagtgcacctcccggcggaaccgcttggccttgtcatcacccagccagtcttgcagaagaggggtgctataccgcgtgagctaatctcacaaaaacccagtaggaaaacttactttaggggagccggacagagagcgttgaaacggaatccctcacgagcgtgaacgatcgccaactcccgagtcatcgccaggaccgcacccttactcgccgtgtacgcaagctggggagtggcggcaccaaccaaggccacgacactagctgtgttgatgatactgccacgggacttcttgtggcgacgcagactgaggacggcgtgcttgctgccgaaccagacacccttaacattaatgttctgtgtgaggtcccagatcttctcgggggtatcgatggcatctgcgtcgttggcgtgcatgattccggcgttgttgaaaatcacgtcggtgcctccccagctatcctgtgactcaaccattgcctgcacatccgattccttggacacatcacatcggatcgactcgactcgagcggtgggaaccaattccttcaccttggccagtccctttgcgagggcgggctcggagacatcggccatcaggacattggcaccctctcgggcgaagagaatactggtttcgaggccgatgccactatccaagttcggaatcggttaggcttgtgacggcattgtatttttcagggataaacaatccacatacccgcctgcacctgtgatgatggcattcttgccttggagacgtcctcggggagtagtggcagccattatgaccttatcttgagctctgtttgtataaatggaatctagattagcaatgactcaaccgccaacattacagcgtgtgatatatctatagaaaacgctagaaggaggccacccacatgaactgagaattcgaattaatatgagagttgtctatcagtgtgttgctccaaaggaatatacgcggggcacgtgggcagcgtggatcccattagataagcggtgacggtgtttgcccgaagcggtaaggcgacaccgatatccgctgataagcttccaagctgtccaggtgcgttggcctgtcgatttgcttgatttacccgatttgtctgacttggaacgagactgttatcgctttgtcccgtctttatcttgcttcccctcacctatttctatcctttggatccctatactcccaatctcactctttggccagatccatcatgtcgagccccgcagaccccgaggtcacagtcgagaatgtcgccgagatcctcaagaatgacacaaaagtgaaggtggctggagtcgatgtggatggaattctgcgcggaaaactcatgaagaaagataagttcttgtctgtcatcaccgagggcttcgggttctgctctgtgatcttcggctgggaccaacatgatgcgacgtactataaggagctggccatcagcaacaagcagaacggataccgcgaccttctcgcagtcccagatttgcgcagtttccgtcgcatcccttgggagaacaatgtgcccttcttcctcatcagcttcttggatccagagacacgggagccggtgtgcgcctgtccacgaggattaataaagactgcggctgccaaagccgaggcggcgggctatcgggcgatggcaggaggtatgtccgatcgcagaccagggtgtgtgagattcaatggctgatcaggatattacccagcggaatatgaattctaccaatttcgcacgccgggcaaccatgtcacccccgagcaaggcgcatctgcaacagccgccttcctcaagtcgaatccagtcgatgcattgccgccagtgacagaaggcatgtttggttattcaatcactcggcccctccacaaccaagattactattatggcattttcgacgcctgtgagaagttccgatgcgatattgaagggtggcatactgaaagtggaccaggagtctatgaagctgttagtgccatgatagtacacggtcgtattgggactaaacattgtgataggcactacaatttggcgaagcaaaggacatggctgacaaggcggggttgttcaagtgggtttgttcctttgctagtgcgggctgggccagctaacttgttataggtacgtcgtcaaatcattcggaatcaagcatggcattaccccatgcttcatggccaaaccccgacaaggcctgccagggaacagcggacacatgcacatctcgctcgtcacggccgacgggaagaatgccttcattcgtgataccccggatccatccccgctctaccccgatatcgctcatctatccgacttgggtcgacacttccttgctggccttctcgtcggcctaccggatatcatgccgatcttggccccgacgatcaattcctacaaacgcctggtggagaacttctgggcgccggtcacagtctcctggggactggagcaccgggccgcatcaatccgtctgattaccccaccgacagctagtccgaaagcgaccaggtttgaggtgcgagtgccgggtgcggacaccaatgcgcatctcgtcctggcggcgatcctagcattgggatggcgcggagtcgagaagaagctcgagattcccttgccgcctcttgctcgcggcgaggatatgggcggtgccagtgacaagggtgtgcgtctggccaaatccttgaaagaggcggtcgttacatttacgcgaccggagagtatcgcacgagaagtgtttggcgatttattcgtcgatcactttgccggaactcgggaacacgaggtgcgcttgtgggaggaggcggtgactgattggtatgtgacatcattaccccgtactcattcgtatactgacaagttcacagggagatgaagcgatacatcgagaccgtgtaaatgccgtatttcttctcatatcgatttttgatttacacagagacacgggttagcagaatgaagaattgtacatagtcgcattggcctagagattggtgaagggtgtgtaaggcacgagattagcaggcatactaccccagatatataccaaatgacattcaacgaattggaagttgtcgatttgccggagttcggatgtattctatatatatcgagttgtcacatgccgatgaacacagggtgacgcagaaaaccgccgggacaactcggcttcggatgtgacactctgaaccctgcgagatatgggcgatcagagacaaccgcggttgattggagtttccggggaatgcggagagcttctactccgtacagccactttcgggtgaagcagggggcgaattgtgcaaagcttgctattacccttctttattatcattctaaacaacggtcaagctgtagaactgtgttcttcgaaagataccgacgtggacagcctaatcagactcggtgtgcggcgtacgccgttctaattgcgatcgtgtatagaactaatataagcttaaaaggtgaagatcgggaaatgtcggccgagaggaagagtttcccgtggaaaacccatgaaaagtcgtccatcgaacgcgtttcggtatcagaaagacacagaagagtcgggaaattataagaagcgacacggtcaaacggggaaaatgggggacaatcggctttccggcttatcattgggcgggtccagaacaaccgcggcaacttttgggtgactctgacgtattcgataccctcgggcagatggctatataggaacaatatcactcaggcttttcctgctttctgctctgtggaatttgaaaattgacgttctatacatggaataatactgcacacactacccatctacatattccatacacatacgtcatgtctttcgtcgaaacacagctcaaggatgtcgctatcctaggcgccatcaacaacgatgctcgcaagatcctgaccaaggaggcatgtgccttcttggctatgctgcaccgcaccttcaaccctacccgcaaagctcttctgcagcgccgtgtcgagcgccaggccgagcttgataagggaaacctcctcgacttcctccccgagactaagcacatccgtgagaatgacgcatggaagggtgctcctcccgcccccggtctcgtcgaccgtcgtgttgagattaccggccccactgaccgcaagatggtcgtgaacgccttgaactccgatgtctggacttacatggccgattttgaggattccagcgcccccacctgggacaacatggtcaacggccaggtcaacttgtacgacgctatccgtcgccaggtcgacttcaagcagggagagaaggagtacaagctccgcactgaccgcaccttgcccactctgattgcccgtgcccgtggctggcacctcgaggagaagcacttcaccgtgaacggcgagcccatctccggcagtctgttcgatttcggtctgtacttcttccacaacgccaaggagctcgtcgcccgcggcgccggtccttacttctacctccccaagatggagtcccacttggaggctcgtctctggaacgacgtcttcaacctgtcccaggacttcgtcggtctgccccgcggaaccatccgtggaaccgtcctcatcgagaccatcaccgccgcgttcgagatggacgagatcatctacgagctccgcgatcacagctccggtctcaactgcggccgctgggattacatcttctccttcatcaagaaattccgcaaccaccccaacttcgtcctccccgaccgctctgacgtcaccatgaccgtacccttcatggacgcctacgtgaagctcctcatcaagacctgccaccgtcgtggcgtccacgccatgggcggcatggccgcacagatccccatcaagaacgaccccgccgccaacgacaaggccatggagagcgtccgcgccgacaagctgcgcgaagtgcgcgccggccacgacggcacctgggttgcccaccccgccctggcccacattgcctccgacgtgttcaacacctacatgcccacacccaaccagctcttcatccgccgtgaggaagtgcacatcaccgccaacgacctcctcaacaccaacgtccccggcaagatcaccgaggaaggcatccgcaagaacctgaacatcggcctcagctacatggagggctggctccgcggtgtcggctgcgtgcccatcaactacctcatggaagacgccgccacagccgaggtctcccgcagccagctgtggcagtggacccgccacaacgtcctcactgccgagggcaagcgcatggacaaagccttcgcgctgcgtctgctgcaggagcaggctgatagccttgctgctcagggtgccaagggcaacaagtaccagcttgctgctcgctacttcgctggccaggttaccggtgaggattacgccgatttcttgaccagcttgctgtacaatgagatctcctctgctggtagtgctgctaagctttgaatgggctttaattttatgatgatgaataccctttgtttatttttgtctggtcttgactttatcgccagattaccatctgcagttagcatagttgtataaaatttattttattccgattacttttaccagtatttcgatgagttatttcgttgtagtagatgaattgctaggattccatttcccaccattctcttacaaccgacagcgccgccgttagtcgaggacctcggcaattagacggcattcgaatagaccgcactttaggtcaatatattccgagacgaatatttcgcatacaggcagtgcttacggcaacttataattctcaataatctacgaagataaaaagaaagatatatcgggtcatgtgattaaagcaatatgcgagacccccttgtttcagtttgtagccaaatccagtccaagaatcattccttcctcatattccgacaaaaaagaaatgtcctctcgctttttagatctctctggagataccatcctccaagagcaagtccttggatgtggatcttcagcggttgtagttctgcgtgacggcctagccgtcaaaacacccctaagatatatttggagctcagatatcgacagatatcgaggttcagatgaatattgaagtcatccaacgtgaacaagatgtctatcgtcggtttcaagaatctaatacccaatgtggcggtattgttaactgccttggtttcttaagagaagctacctagctcacttatatggcaaatggcgatcttcgcacctacttagcaaccaaaagaccacctcaacagctccaactttcatggtttcgcgatatggctcgcgcgctcgagtatatccacgatcgacgtgtgcttgtggcagatattgcgagtcgaaacttccttctcgattcagatctaacaatcaaattctgcgatttctccgaagcatctcttctacccttggataccgatatggattctgtcgatgacaacggatacacagctcgaatagacattggctttctcggggcagttatctatgaagttgtgactggcgagaaatgcgaaatcgatctctttaaagataaccttccgagtgatggccgcgctacctggccgcggagagagttccttcccaataccgaaaatgtttggcttggatcgatcattgaagactgctgcgtcgacgggggatttcgaaatgcgcatagcttgctacgagcactagattcaatcactctatattccccaagccccaaatctttatatgatcgaccttcattgacagaatttatccaaaacttggtcgatgggcggtcgattgtaagactggcagtcatcctcggtgccttgggtacgttcgccctatatatgaatagaaaacagctgtcaatgtcttgataatctatgtgcttgatgttctatattttgtttcggatcgctacttcggctgataatatccctctctctggttattcttctgtcaagcatcaacaccggtacgccaagagactatttcagtctattatacctctccctcgctcgcgtacttgtttttgcgataaggtcccaatccaagcttcaacgtcgaaaaatctcacataccaccaaagtcggtggtaaaaaaggtgaccgtgattcaggtggatcaattcggtagcctatgcataatatgggtgacttgatagagaaaatatttatactaacgtcgttgacttgatgttttgcaataggccctcgtatatgcgtgtccgacatgacggcagggggatgcctatcagttaggcaactggacaccgtagcaaaaacattcaatattgtcatcaaagagggttgtttgggcgaagagaagatggatcaaggaggggtagggtaggcacgttgtgcgtgcatgtagatatatcgcctgacattgaaattaggcccctcctactacccctcgccaacaccaatctagaaatattctagtttaaatcgacaggttgattatctcaaggtaagtgacaaaaacactcgaatgatggctaggccaacccttcaccaggaatccacattatgatccacaaagatcttcctccttcggtcgaatccatccgcagaatcatgaaggaactgatgcctgaaactgctacatcaccgaataaactagccgaaaaccaagcagcgatatttcacgaaaacaaaaatggaaacaaagcatatcggggagacttactcgcgaaacaaatctctcttctcacgatacaactccgcgtcacggaaaagctgcaaatcggtactgtatgtccattgattatcatttactttgcagacaacggactcatcagaatataggattggcgatggcatttagtgcatttttcgaaagataccaaacttgagaacgttcggaaggaaggttacttgatcgtattatccaataccatcaccataacgcctggaggagtactcaaagagggatcatacatctatatcatcaatgagcctgtcataagtgcaggggcaactgccatatttattgttcctccgcctcttgactaggtaggacgtgggtacttctatttagcttatgtgtactccgtacatacactttgatgtgttctttcggggttcagactggcaattatttatctctgtaaattactgagaattgtatcatcgaagaaagaaattctcaggttgacgaaataggctcagagaaagacgactcaacacaactcccaccttcgccaaataaagccgatatccacggcgtagcaacagaggttggttgtatttcgggtccctgaaccgttctcgaaattggggtcattgcgttctcgagtccagccatggctcgatcatcttgataggggaggtagtccatcgacagggaatcctcaaaaaggttgtatgaggtctcggccacagcctgatcgtcttgaaagggaaagtggtgcggtcctccgatgggctgggattcctggtttgtctcaccgttcaaattgcttctagattatgcttctaatcgtatcgaagcacccggagacataatgatacgagcatggcgatgcagtggttcatatcggatgggggagtttttaattcccaattcgggttacacatatatattgtatagttgcgattccccgactgtaactgaaatttcctgcttaatgcgagaaacaatgccagtatgcccggagacttgtatctcgcggaggggcagtcgcggactggtgcccaacatcagcgctccccgcatcaaaaagcggagtcatgtgacgtcatgtgactatgttcacgagtcaagcctttgacgtacttcacgtatttcaccagtatccacctcagtttcgacaattataattagccaaacgatactctccacctacaatcacgcgaattccctaatacccaggtaccccctaaaccaggcgatccaaagagggtggtgtagagcatggttgaagtacagccaagggaaatcgttagtatcgtaagatgtaaggagcggacgacaatttgattcatgggactgcaagtctttcgcggaacccaggggttgtcgtaatatacaccagagaccgatgagcctggacgcacggtctgctgtaatgtaaccctaatgtgctatatagttagctcgatcgccatgggagaggctaaaagcccgggattcacgccactgtctcaggattgctcaaactaccatgacccacacgccatttcgcatgagaacaatacgcatgggatcgatattccactgcgctatgaatctttctgtacatctgggacggttcctactaaattcgaaacatgatcttgctcgcagctttatagctcatatcccgaaagctaggtgtaaatggcggaccctgataaagtccggattgtatgtatgacgaatgtattcctgcagcctacaatggagccaaatccctgccctagcccattccttccatcatgcaatgttactttttgaacgtgtccgatactaaataatgagttagctttgaactaagacattatgtgatctgctcttaattgtgctataagtcgacaaattcccctgtctaaaagctcgaatcgtataagagagaaagacaattgcctaagaatatccttcaaccggtatggagtcttatttacaccgaactcttgagagattattgaccccgctctctgttttccagcgcccagtggacctctatgatgttaccgaaaagcttctttggatctttattccttgcggtaacaactgtttcaaccttcgcaatgtcaacagcccgttacacagtaccaattcacgaatcgatccaaattttggagactcgtcaacaactgaatgatatggcgaggcaatacccactcggaactatggacgacaggaatggaggctattatctcttagactatgatgataccgttctagctatcgcatctgatcccctatgtgaagaactggatgctgcaatcgaggcagcagaacggtaccgcagcgcccattccgaaatcgacgatgaaagcgaattcgctacacctacctcaaagtgacagggacaggcacactctgacctgtctaagcgttcttgtacccatccatgctgcaacgcatatgcccgctgtcggacctacagctattgccacgtgtgcgctagaagctatcgttagtgtttctgagcaggtcggagactaggctgatacggaaactctacatgttgacctcaattgtttagaactgctcaaaaccagagcaaaattcaaattcggcgagcttcaaaatcctttcaaattattcgagtcctttcttctattttattcgtgtatatgatgaaccataattgtggatgacacctatgtatatcaactgcagcttcacatattagttattcttctgtttatatagctagtaaaatcgctctctatatcctccacagaatggtacttaatgatgaatctctatacagaaagagacggtggcatttactatagaaaggggcggacccagagaaagactgaaggaaatagggattaagtgttactattcgccacgttcctcgttgttcttctcatcaaagcaaatacacagagccgcgattaatgctgcatccacaccaggtgccacaacaacggcgtaggtctgctggccaaacacaaggtcacggccgctaagcaatttccggtcaatgcgagccaccgttttgccgcttttatggtcgacaatgtcggcagtacgatcgaaccagcctccttttatattgaaaatcaccgccttgccattactatcagtgaaagtggcggtggctttggagccaagcactggtgcagttagtaatgtgtataatatgtctactttgctgaatatcttggatcataaagacggcacttacatgtgagattactcttaacctcacaaatcttctcgcgatgggtgtcttcgattgcataggtcgcatgcacgtgtagaagctccctgacaatatcaaacaggtgcttgccatgggcgtcctcgacctttttgcggccagaaagcgatacccacgctccgtgcactttcaaaattgggtcaccattggccaatttgacgtcgaagctatccccagacgcggagagcaccttctctctcaggactagtgtctgcggctcctttgcgacaaattgttcgaacagggcgattggctcggcgaatggctcgagattgtggtgacccaggatgcccatgacgacaggtggattcaattgaagctttcgaaggataaagattaaataatcaaacagggcaatcgaccacaggagcgcggggtcagtctgaagccgatcatcggttggcgatatcatcacgtgatagcttgaagaaggtttactctccttggctggagcattggtggttgttttttccgatcgcctcgcacctttggtcacgatgtagccaatagttataaacgagtgatttgtgaggcgaattcgaattcctgagctttgttccttcaggagtttctattagcattatagtgtaagtactccgccactagcatacgcggtcgttttagagctcttccacccgaccagctcgttctcttcaatttatttctctccaaaatacccaaataacgaattctgcgctctgtttttgtcaagtgaactatctcttcagcgccaagattgttgatcgcgatctccaacgatcatcactggcccattcgccctaaccccacttcattggtagaattcaaccgaacccggaaaacccggcgaacctcatgctaatatcaaaatagcttcttttcctgaatttaattgatcgttggccagcaacatgctggatattgtgtggaaggatatggcgcccactgtggctgtcgtgggaatctcccttataggcttgcgccggtattccaagttcaccgaggcccaacgagtcgtctttcagattgggcttgtttgctctattctgggactttctctgtttgtcgtgactcagttgctgggtctcgtatcttacaaggatatttaagcttatgtgtgatggggcatttcgcgacatcgattatactgtaatgcgtcttcgcgtgcgcgtggataggcgtgccaattcgcgcgtttctgtttcgacgggttttaagtcttcgattttctcgtctatgctcaccaaatcctccgcaatctcatatggtgcttgatctgagctagattatgggagtacgtagtataaatgacggagccggctaaaaggtccaattgctagcaatttccgctatctacgccggtttcggtaactccaacgccgataataatgagagcgatcattacctaccccgccagacaacgagctatcaccgatcagcgctaacaacatccatccttttcaaccgcggatgttcgacagaaacacgaaacgctcactgggatgtctgcagatgccaaggcaatgtcgcgtgcaggttcgataaaagccgcttcggtagtctttccaaggcgagtgagacattcatataagccatgcaacccccacacattgttgagctttgccctacgccgaggatagtccagggcaaatccaagatcctgtttgaacagcacttctgcctcctcggcgcgattctgctccaggagcaagccgccgagggcatggcggactggctgcatccaggggggcgggtcagagtacgcaagtccatcctcgcgcacaatagcttccctgagaaaggaaaatccgttctcaatgtttcctttccggtactccaattctccagcaagcatggccgaggctacccctagaacgtcttcctccttgcatggtatgctgttgagtcgggtactagggactgccctgcgtgccgcttcaaattctacctgggcattttcggcttctgcaatccgtccaagtgcgctaaacgcaagaccacgggtgtaataaatgatagctgtggtcacgcaatatgtatcacgatccgtgggaagctcaaggctgagaacctcctcccaacggccaaaacgcactaggacatgtgccttgctccccacaaagctttcgataaagtctgccatcgggggacttttgatcgccagcacttgaggatatatgaccttttcgagcttttcggcagcagagattgcgtccgagaagcgaccggacatcatagcggaatacaatttcgcacagatataatgtacccggtaggctgtgtacataattgtgcccgtctctcgggcaaaatagatgtcgtcggcaagcatcgcttgatgattggagtcgataccacggcggtagtcgcccactgccgcatcgatgtgcgtcggcatatgcaacatgtgcgaagcatgcggaaccatcccacgcagtcgatctgcagccggtagagccaattctgggaatggagacatctccaacatgtgtatatacagatgacagagtgccggatgatcgtgaccggtagtctgcttcagccccagctcaatgacctcgcgagcctcgaccgtgtgatttcctgtaggtttgccgctatccaaatcccacagcccgcgtggggtgatacacatcagtgcatcggcgaacagagcagcgacgtccatatcgttgctgaatttctgatacacagggcgcatggcatttgcgtatgcgtggtcaaaaggacttaggtcgtcggggatgtcatggacggatggaaagcgggcaccgatggcttcgatcaatgcctgttcgactggggtagcatgacttaccagcttgcgtgctcgttctaggacattattgaccttctcgatagaagcccggcgaccttttggatcaaagaacttccaagccttgttgtaattcggcccggcagcgtaggcgactccccataacgctatcgcgcagttggggtcactgtccgctgcgcgttggaagcatcgctctgcctcatcatggttgaaagaaaatgcccatatcagtccgcgatcgaaccacagttgggtttctgccgaagaggtggtcactggtcgatgatgcgagccaagatcgtaataggtttcttggtccgaggcaggagatttggactggtccctaattgaggtattacattagaatccgaattatcagaacccgagacactcactgcatgctgggtactatggtcttgcgaggagatcacaccgtggtttcctctaccgtttaggtttccttcaatccaactttcttttcccgtgagaacagaaattgatgatgagcgaatcaagcttggtctagacaggacggaagctgatgaaagaatgaagcatcgagatgataagtggcaaaagagagagataaggaagaagatcggggtttaccccgccttttaaagccacccgtggaccttctgagtttatctacgacatgacccacattagatctatatatcaaggagcatagtacatttgcacgatgcgtctcgacagcaagtgggccgctctactcccggtcattcaagatatctgcaacatctcgggtatcccagggctgtcgctgggcatcgtggagaataacaaaaccgtataccccccttcgctgcacaactttcgtgctagggtccctcaccaaaagcctgacggctgctctagtagcctctcttcatgacgtcggtatcattccctcatgggatgctccattgaagacgttgctaccagagtttcatcgcgaagatatctacggcgaaattactctcaccgatctgcttacataccgtaccgacctagcatctcttgactctctctggctcgcctcgaacaatgttccttatctgcctcgatcggaggtcgttcgaatcctcaattacgccccgggtatccagccattttgaacacagttcatttacaacaacttcagctacgaggtactcggccaggtgattgaaaaggcgtcgggtgaaatatttgcagaggttctgcagagtcgccttctcagcccgctcggtatgcaccgaacatattacacaggggagagcagtgaaaacgaagcgaagccctatgctgcgctagaggacgggtctattgtccctattgcaccgccactgcatggtgagaatgtgttgatggggccagccggtggttttcgaagctctgtcaatgatttattgaccctctataaagccttcatgggtgctgctcttcatgagattattcatccagacacgggcttgcctgatcagtccaagtccaccattcgaggtatcaatcagctatggaaagggcatcaatccctgccctttcattccctcagggagcattcgtatggatttggctgggcccgggccgacctttggcactggaacatgaagtttttcttgaatctccaaatacaagttagcgtgtcctgttgcaaaatcccccaaatgtataatctcttacaaattgcatggttgctacttcagaggctgtggtgtagtgggctggtcccgaattggggtttggtattttgacaatcagctgcttcccatcttgcatcgtcgcgaggaatactttgttaaagttcccctctggtagccttgacaaattcagacagactgcatcttgacctgcagcttcttcggcgatgtcgatgagtgcatttacgtcggattggatgtatctgcgtcgtaattgctctgattcgttccataaccatctctgagcgaaataactgtaataaggctccaggtcggaacctatcacttggtgagtcggagataatgtaataaacaaagcaacctaccagatttggctcttcatctgctgggcgacatggtgaattttcgagtgatgtgatgcatgggtaatttcagggggttgaatctaatccgagagttcttacaagcttgaaaaatcattttgggacgacgcagtatggcgataatatgtgagtgaagttgggttggtttgccagggggattctgctcgtacatgacggagcgaaaaaggaaacaattgaggttggctgatatttgtggcagcctgcagatggcatggtctaaacacataagtcgtattaatggagtgaaattgagaataccgaggtatctctcaagaaaggccaattccgaccccattgctcgagacagccaagtacaatcgaatatagcgtggtaattccgaaatggccaaagaatacaagatcaacgacaccaagtattcaacttcattatctatatccttctcagggccacacctaacaataatcctgtacaatccaaataccagctataaactcaaccacttagacgtactcccaagcaaccggggtgctagtgttgacagagacagccagagcatcgaagccgaggcagtcaccaaccttgccagtggggacagtagcgttctgcagagcagcaaaaacctgccacttaggggcagcagcgccccggcgggaacggcgggagctggtggtactgttggtggtaccgttggcagtagggcaagccatgaagccagatgcacccaggccattgaaggtccagtggccgaaagaggcaccgggagtgtagacgaagggaccatcagaggaaccaacgggctcgtaggcagagtggggagatgtgaagcgcagagcacccttgttatcaacgtagatagcctggccaccggggacctcgacatcctggatatgaagttagcaaatggagcattggaaatatacatgtatcagtatttctaaccaagtagtgtccgttggcaatcacggtctggttggtgttgggaattccggggacgggagaataggtgtaggcgttgccaccgagccagaagtagctgccggcggcattgaggggcagcaggtggacgggagaagccgagcgggcagagatgacgctgaaggcagcatcggagctgttggcctgcttagagccggggatggcagccaccagaggggcgagggcgagaatagcagagaacttcatcttgagggataggggaagtgattgatactgaggatgagagaattatcaatgaagagagatattcaggggatctgtcagggtcatatataaggtacgctcggaaaggaacgtgcttaggcaactccataagcggacccagctgagaaatcttgtgatcgacattgaatccggtggagccgagttgaagagaaagagggaaatgtcttacctagacgatacaacataatcctgttcgatatatatagagatgggagtatgtatagggagcctggaaggcccaagatgggaggaaaccctaattaggtaggagtgacaacaaacaggtcacatacatcagcagtatatctctacccaccgtctacttggactattgagaggggcttcaacacggtggagatcgactaactggaccacaaatgtaggtattccccttcacggtgtcaattgacgcaaaagtagacaccccaattgatccaaaacacatgctgttggaccctgaagatcccaatagaagagccggaaaaagctgtttcagagaactcatgaaagttcgacagtgattaaagatcgaccggaggtccgacagactttgcccctaagaaaaaagaagagaacggcaacctcttagctgcgccatatggggatccacgatatccacattgtctcagggcacatcgtctttgccatcatcattggctgtgtcgtcaactggcgtgatatcggttatctatcgtgagtggctgtattgctattttaatttagaagttctcgaatgtctcgaatgtgtcgactgaataactatatcatacctcggttgatagcattgccaccgtccgatgtatatattgtctcacataaatggattgatgatgtggaataatcaggatataacagccctaccagcgtagccaaccccccaaagtacatactccgtagtagattgtttattgtaggaaaaggcttacaataagtgggataattccacaaacttcctcgtacaccccacgatgtttttgataaaaggggcatttaatatgatgtcagtgatatgatgtcaggtgacccacccttttctccgtgacgcgatggaaatagaacaacaatcaaccaaacttgtgcttaatcattttcagaaggtctacaagatcatgggcatcgaagagtgaatggcttccccacgtgccaaggccggagcttcgcgctcggtcaaattctccccttccacgcgtcgcggctatacgtcactcccgaattcaacagtcgaacactcaatctcacagagcaatttgggacaaaatgacgacctggacactccttcaagtggggatgagtccatcgagcaggccaatataaaactcctacctttgaaacaaggtagagctcgagattcacggctctcgagccccaaaacaaatgaaccgaaccccactatcaatgtccccgacgacgagcgtgatgcatcagagcgaataaaagagattctcgaggcgaatggcaccattccattgaactcattctcgacagatttggaggaaggacattcggacagagactctctggttctcagtgatcgatatagtgacgactatggtatcccgtctgacaagggcctgcttttgaacgatataaagcgtgaagatgtgggaaagggctctgactggaggtcattgttccgtctgacttcctggtggaacgttctcggcttgttgataatcgccctactggtagtatggttttcgctcaggggactgggctggtcttctgtcggagctgccattggtgaatttgtaggtctttcttccttttcgtctggtcatttgaagacaagaaatcagcctctaacaatcacagcaagcggtcccctggtaccctactcccctcggcggaacgagcgaacaatggaaggagagctatgccaaagctcagaaaatggtcagagaaatgagcctcgccgaaaaagtgaacgttacaactggaacaggctggcaaatgggactctgtgttggcaatacgggtaggcccttgatatccgttcgctaccatggctatgcaaactctaacgcgaactgggttgtctagcacctgccgaactcgtcaaatttccctccctttgcctacaagacggtcctctcggactcagatttgcgcacaacattacagctttccccgcagggatcaccacgggtgcgacatggaaccgcgagctcatgcaaatgcgtggctttgctctgggaaaggaggcgcggctgaaaggcgtgaatataattctcggtccatctatgggaccgattggtatgatgcctgccggtggtcgtaactgggaggcattcggttcagatccagttttgcaaggcgtggctgcggcggagaccatccgcggtatccagcggaacggggtcatggccacggcgaaacacttcattggaaatgaacaagaacacttccgtcagtcatttgagtggggtactccaactgcgctctcatcgaatatcgatgatcgcgcattacacgaagtctttgcctggcccttcgctgagagtgtgcgtgcggatgtggcgagcgtcatgtgctcctaccaaatggtcaacaacagctatgcttgcgaaaatagtaaactcatcaacggtcttctgaaagatgagctcggattccagggattcgtgcagtcggactggctggctcagcgttcaggcgtgcacagcgctattggaggcctggatatgagcatgcccggtgatggccttcattgggccgacggtgtcgcgctctggggaagtgaactgactcgcgcagcgttgaacacgtctgttcccattgagcgcctgaatgatatggtcactcgcatcgtggccgcctggtaccatctcagacaggactcatgggaaccccctgcacctgagggcgacggcgggccgaacttctcgtcctggactcaggagcgaatcgggcacttgcatgaaggctcaccggataatgatgcgacgggtgtggtcaacaaatttgtcgacgcacagggaacaggcgaggacgctcattctgttgttgctcgtcatgtcgctgccgaaggcaccgtgcttctgaaaaatattaataatacccttccactcttgcgggcacagtccgcaaccaatggcaaataccgggtcggtgtatacggcgaagacgctggtcctggccaaggaccgaatgcttgtgctgacagaggatgtaaccaagggaccttgggctctggttggggtagtggggctgtggaattcccatacttgatcagtccatgggaagcactgcaacatgcgtggtcgaatgactctgtcgatgtcaaagcttatttgacgaataatgttgcacctcaggacctcgcaaagcaggacctctgtttggtctttgccaacgcagacggaggagaagggttcatccgcagtgacggcattgatgctgatcgaaaggatctctttctacaaaagaacggcactcagttggtagagggggtggccaagcactgcggcggtggccaaggtaaaaccgtcgttatagtacactccattggccccgttgtgatggagtcttggattgaccttcccggtgtccacgctgtactgtatgccaacctacctgggcaagaaagcgggaatgcgttgatggacgttctatttggagacgtcgacgccagtgggcgtctgccatacaccatcggacgaagcctagaggactacggtccaggcgcacaagttctgtatgagcatgcagacccatccgttccacaggtcgacctcagccagggcctgtatatcgattaccggtatttcgacaagttcaacatcactccccggttcgaattcggcttcggtctgtcatacacaaccttcgactactctgcactgagcatcgagaagctgcagaagaagtcccaatggccttccaaacggcccacaaacgaagtcgaacctcccacatacgacaaaaaacaggaggacgccagcagcattttattcccgccaggtttccgtgtactccggaaatacatctacccctacctcaccagcctagaaggaaccgaacccggtccatacccataccccgaaggatacaacaaacaccaaaatccatccgccgcaggcggcggaccgggcgggaatccatctctctacgagcccatcctcgagctcaccgtcgaggtgacaaacaccggcacgcgcccgggacaggatgtggtccaggtgtatgtttctttccccgaagatgtcgccgagcaccgtggactaggatggtcccgtgagtcaattgagttccctgaacgtgtcctgcggaatttttcgaaaatcctcctgcaaccgggtgagactagaaatgtcaagatgacgttgactcggaaggatctcagctattggagtgttcgtgcacagaactgggtgttgcctactgaagggaaattccgcatctgggctgggcgtagttctagagatttaccgctcgtggttgagttttgatccaggacttggaatactgttataattataaaattgactcgatctaatttcccaaatgtgtctacgtggctacaagaagccgaacttgaaataaacggaccatagtatatgtctatcgtactgaacagggccatgaaaagccagagcgaaacaaaatcaaataacgtataaacttttgctttgacatggtagatgcactgagttaggtatctatccgaaacatgtacatactggcggaaatggcaataacaaaatctatgccggtaaaaaaagaaaagagaacagaacgcagaacgccgaaacaccgtctatgagatccaatgcagaccaaaacattatcatggtgctcatgatgcgaggacatctcagcgattacgaatcataatgttaaagcacgtagaagcacgtctattcgtcgtcggagtcctcgggcttgggagtacccttgggggagttcaactagaaaatgggttagcatactgtggaagaaaagaaatcaacatgaataaggaaactcacccattcgatgtagcgcagacgacgacggatctcacgctccttctgctgagcacgggtcatcttcttcttcttcttagcgcggaacttgaggtcgccttcatcgccagagttgacggcagatggggcggcggatggggcggcactggtaacggcggagccagtggcgggggttccagggccggaaggcgagttggcggcactgtcctcgaagcggtcgaggctgacggcgttgttggtgcggctgacaacgcgaccgtcggcgatgtgcagttgctcggggcagagagcgcccacaaactcttcgttgtgagaaatcataacgacaccacccttgaagtcacggatggcaacggctagaccaccgagcgagtcacgatccaagaagttagtcggctcgtccaggaccagcaaatgggggttgttccacatggcaccggcaagcacgaccttgaccttctgaccaccggaaagaccggagatctcgttgtggttggcgatctcggggtccataccaatgtcctcgaagtgcttggtgatggtcttggggtccagaacacggaagcccagaccttcacgggaagcctcgtgatcgtcgaactcctgaatcaacttgaagaaaccaagctcgagcagggtctcacgcgagatcatggtgttgtacttggggagaaggccaacccacttgacctcatattggaaggacttcttccacttctgacgaccaatcaaggtttcgatgcgacgggcaccgcggccgtcacccaggtcaactggcttctccagctggatcttgtcctcttcggtaagaatacgggtctgcttcatgaacacttcacgatcgtcaccgttggcgtaacgccactggaggtactggctgggagtcttctccaaatgcatctcaacgtgctccagagcgtgctgcttgatgtaaccgatacgcaagttggggtgcttctccacctttccgccttgaggaatggtctcaccagtcagaatcttgatgaaagtagacttgccggcaccgtttccaccaatgatagcgacacgggaggagagggtaagggacagcgaggcatcgtggagcgaggggcgggcagcgccagggtaggtgtatgagacgttgctcatgcgcataatggcacgagttgcggacttgataccagacaagatgcctgggggagggaacttgaactgcacattggatgcggacagagtgtagtaactcttgccctcgggcttctgcttgacgaattcggcaaggttacccttgtagcagacgagcttcttgccctcgtagtggtagatatccgtgcagacagcatcgaggaagccggagtcgtgactgacgatcaaactggtgatctcggtgtgcgatttgaggtactcctggagccacttgacgtttgccacatccaagtgattagtaggttcgtcgagcaagagcacatcagccttctggagcatagcacgggccaaagccaacttcatcttccaaccaccggacagagagcccacgggctgggactggcggccctcggggccatcggtgaatccgaactcgaggagaacctcgcgaatgtggtccataccctgggaaacaatcttggggtccttggcaacatactcaaggatggtcaggttggcatcttcaccctggttgtgctccacgaagcaagtgcgaacctcatcctggggcgggaagccttccaacttctcgttggcgatactgcgcatcagagtagactttccggcaccgttgcgaccgcaaagaccgtatcggtggcccttgaggagacgcaggttggtgtgggacagcaggagcatacctccgtaagcaagagagaagttggcgttgacaatctcaacatcgttggggtcatctgggatgggcttgccgaacttgatctcatcctctgcgatgtagtgggcttgaacagcagcggcgacagcctccgcgttaccatccgcaagcagaccgcgcaggtatgggctaatgcggtcggagatacggtcgtgcatgcggcagttgacatcttcgcggaccatgccggcaatgaagttcttggccagatcctgcagcttggagtctaaaccaaccagaccaccatgctcctgaatcttggcattcagcacgaccaggacctcctcgggggtgatcttggagatggaaccagaggcaagatggttgtctcccatggcagtctcgataacgtcgagagcacgggtggcgagctcgcgaacctcgggcagggaggcagtctccttgaccgacttcacaccaggctggagcttggggaggaaagtacgggcctcagcgggatcgtggaccagcttggtcagattctccacaacgaccacggtctggcgaagggtttcttggggagtagcaggggtattgagggatcgagcgagcagaggagtcaacatggccaacacgggagatgtgacgatggcgacgaaggtggtctgagacaaagcgtggatggccttttgaagagtctgggcggaggggttctccatggtcttgatcagaaggggaatacggggggcgacatcgtcgttcgacaggagggtggtgagagcagtcatggtcttgcaagactgcttggtcacttcactcttcaggtcgtgcatgccggactcgacaatggggatgagctccttcagggtcttgcccatagcctcacgcagcaagtccttctggcgctcctcgtccttggtacccttgcccaactgcgccttgacggccatcttttcgatcagcgagtaggcacccacaaagccttgccacttgccagatcccttggccaggtagcgctcgagagcggggatcagaccgttgaccatggcctcggggctgagacagccgaagagggcatcaatggcgtactgggcagcatcacggacgacggcacccttgtcagaaagggcatccagagcaaggtcgaagacgcctccgtcgtgcaagaggaaaacggcttcactgagaggaaattctcgggggaagcgctcgaacaaagcaccgatgatgagcatggcacattcgcgcttggtaggattcttcttatcggaagcagccttgcgaacatcggcgagaacattgtagttcagcaggccggctgtgccggcgccctgaataagcaggttggtcaaggcatatgcgccatccaaagacttctgggaggtgtcggaagtgaagatggtgttgaggactgaggaaatctcctcggaggtggggggcacgccggaggggccctttgcaacgacagtcggcatggcgggagtctcagatggtgagacagtatgcggcattttccagagaaacagaaagtcgaagatcgagtgtcggtatcaaagaaagataccgaaaaaaaaaaaaaaaattgaagcccttgggtagagaggggcaattcgaccttacggaagataagactgttcacagcgcaactcacgcacacaaacagaggagtaggatcgggttgaatcgtagagtatgtacacacgattctgaagaaaccctgaagacccgaaacacaacgaaaaaagaaacacaaagaggggagagtggtctaaagaagtaaaaacaatcttcgccatcgccgattgctgacccacgggcgaccgaaatttttttttgcttactcatccaatcagcgggtccggcggtgccatgggacaaaaggcgcctaaccggatttgtctgattgggtcagtgacatgtctgccttggtgcctggaactcctgatgccttactgcctgaatatcgttctgccttgttgccttattcctgaaattgagctatgcctgaggcgttacgtcacagcaatcagaagtaccaacgtgaaccgacgcttctgacggataaatggatgttctttttcactctggcgagccccgaggctcatctcgtaaggatattggcggcattgggttcgactcggtccgaggccagccttctccaagtatgtcagtagctatcgtatacaatgcatgtcaatgaaagatatcacgatttataccactactctgtagactatccaggtagactgaattacgaaatagccctgtgttcactgagatgcgtcatatccgtccatttcatcatccccaacgttagcacagccgatatggccgcatgaccccgggcctcggtagacacaaccccttgttccccgcgtccaaccggtctgcattcggtcaaggcgatctctgagttcggctgtttatttctcctctttttgtacatttatcctcgtcaatcccccgagtttgacttcaattgctgtttctccctattcccgcaattcatctccgcccccgcaaatccacccccggaccccatcaccacaccacacaaaatggctctcagctggagatcaacccggcatgtttcaaggcttgcacaggtgagtttggatgataatgattacttgtaattagacatttcgggctcgctaacttttcttttaagtcagcacgacctgtcctctcggcacgtcactatgcgaccgccgagcccgacctgaagactaccttgaaggaggtcatcccggctaagcgggagcttctcaagcaggtcaaggcacagagtgaggaagtcatcggcgaggtaaagttcgcaaatgtcattggtggtatgcgtggtcttaaagccatcctctgggagggctccgtccttgacgctgatgagggaatccgcttccacggcaagacaatcaaagactgccagaaggaacttcccaagggtacaactggcacagaaatgctacccgaggctatgttctggctgttgctcacgggccaggtgccctccaccggacaggttcgtgccttctcgcgcgagctcgccgagaagtccgaactcccctcatatatcctagacctgatcaagactttcccctcctcaatgcaccctatgacccagctgtcaattgctgtggcagccctcaataacgaatccaagttcgccaaggcctacgcggatggcatcaataaggccgactactgggagcctacctttgacgacagcatctcccttcttgctaagattcctcgcgtggccgccattatcttccgtcccaatgacatcgatgccgttggtacccagaagcttgacgttactcaggattgggcacacaatttcgcagagctgctgggcaagggtggctcagaccatgctgacttccacgacctactccgtctttatcttgctctgcacggtgaccacgaaggtggtaacgtgtcagcccacgcgactcacctcgttggaagcgccctgagcgatcctttcctgagctacagtgctggtctcttgggcctggctggcccactccacggcctggcagcccaagaagttctccgctgggtaactgccatgcaggataagatcggaaccaagttcacagatgaggatgtccgcaactatctctgggatactctcaagtcgggacgtgtggtccctggatatggtcacggagttctgcgcaagcccgaccctcgtttccaggctctgatggacttcgccgccacccgccctgatgttctcgccaacccggtattccagttggttaagaagaactcggagatcgctccgggtgtgctcactgagcacggaaaggtatgtccaacagcagacatcatcaaaatatctttctcagctaatgatttttacttttctacagaccaagaacccataccccaacgtcgatgccgccagcggtgtccttttccaccactttggtttccaacagcccctatactacaccgtcgctttcggtgtcagccgtgccctcggccctctatcccagctgatctgggatcgcgttcttggcatgcccattgagcgccctaagagcatcaacctctcgggcctgctcagcaagaaataaataccaatatgttgcctggtgcgacctaaaactccttggcctcgacggttcaaatgatgaatgtgaagcgagctttcctgatttttcattttcgttcggtcgctttcgttttctcttatgtatttcatccgactagacagaattacctctatagaatgcttgtttttctgatcaattggatctcaattttgagcaaaagaagtacttgagattatggagagtaatgtaaaccggatgggaagatcgtcatgaagataatgtaagacatgcaaggcagccgtttgtgattgactttcgagagatggccatattccctgtagccttggaccagtctccacagactgtgtgttggcggtcgtaaggagctcggcctgcatatggatcggaagaagaccgagagccgaggagtatcaagttgcaatttaggaaactcgcttgattgaataaacaatgtcaatataacgaacagaatgctgatatatgcattatctccatgtctagctaagataaaatagaactggtcgtcttaaaaacgcaaagcaaatatgtaatcctatccagaatctgcatctgcctcggctcacaaacgaatactcccagtcgacaattgctcccactctctctgtccatacggcgaatagctcttatcaccaggtgcaatccacaagaagtggtcatccttaccctcgggggctttagttccaagcaaagcaataccaacactctcatcccgaagcggtaccttgttctgcttatgattgtggatgtgcgtgggattctcgacgatgcgaaggaacaacggaatagcatatttaggcagcttggagcgtacgaatctcggaagcgctgtgttgtcaaatgtctgtcgggcgtccgggctaatctgaatagctgcacacccagcccgtccttcgtaattgggaagacggacgccgtagacgttcgcctcggtaataccagggaagtggcctaggacctctgaaacttccgcggttgctctagtccatgaatgctttgattagctttgcttgtattccctcaggtgatttcaactcacacgttctcgctcttccagcggaaggtatccccaagtcggtcgaggaagtaccaacggccatcactctgccgacgcagagcatctccagatcgataatagagatccccttcttgaaggcgtcgcgcaggaatttcttattggtcgcctcgtcattgcgccagtacccctggaaagccttttcaccaggaacattgacgataatctcaccccctgctcataaggcgcgcgaagcgcaaagccagtattagaatcgcgcagaatatccccagtctctgggtcaatagcaacaggaacgaagacattatacagtataccccgcatgatcaaaccgtggtgaccaaaaattccagacgtgaaaggaccgcttaaagaactccccgacttcagcgactctaaaccgctcccggatatccggccgcagaccgttgccgtacatacagcggaccttgtggtttcggtcctggggtgatgggggcggcacgagcaggtaatgcgctgtctctctgacatagatgaaaatagtcgactccaagtcgcgggcatcggtccagaatctactcacgctgaacttgggtgcgatggcgacgctcacgcccattactagacatgcgattacggcgacggctgctgtgctgtggtacaaaggcatgcagctgtatcagcgatcgccgtctgggccgggcgtgtctcccatcagggcacgtcggatgaagagagtggtatatagtctggacattgtgaacgcacagcccttgggcatacccgtggtgccggaggtgtgtaggaggatcgctgggaagtcgctggtcacatgtttgctcagttccttgggtgggagggttattgggaaagtgttgatatgcgcctttagcgagctgtccagggtcatcgacttcattcccagattgtgtgtaatagcgtcgttgctttcatcgacgcgggcacgacagtcggcatcttcgtcgacgagcagaatattcgcgccactgatcttcagacagtgcagcaatgcgtcgccagtgagattgtaattgatcgcggccggggcacagccaatgctccagaggccgatccatgcgaaaatgtactcgttgctgttctggaggtaaagggcaacgaggtcacctttcttcacgccctgtgataagaagaaatgggcgtattggcaggcttggtcttggatttctcggtaggtgtatggtctctcgcgagtccagacacagtccatgccggggtattacttcacagtctgcagtaggacgaaccatggatttccttggttttgacgaactaaagctgatcagtatggtttacaattgtcggatagtatgtgaacataccggcattggcatattgtcgttcagcgtgcttcatcgtgaccaaatttgatacatccttctgaatatgaaatttggcattcagatatcctgcgactgtggctcctcccacgagagcagcggtggtacaacatgagcatagcattatgatagaccatctcgtaccactcgatggtcaaaattcttgctcttcccagacctcctcagcaatcatcctcaacatagcgccgctaaggctgatgtcagtttcttttgggatgctcggcgggcgaagaaagagcttttcgaagctgataataagcggctggccactgaggtagacacgattgttctcgcctttgctgattgtaacgatttgctgacgtttgaccatatcgttcacaagttcccataactctagcacgatgttgggcgagctccgactgatcttaattgtaatgaccatttgaacatcgccgttggattgggaaaaccagaaccgagcatctgacatcaatttgctgggcgactctgaaaagcccgtttctatgacaagcgagggccatttcttcgtccgagctcgaggaagtctttttggtaaaaattgacagtctggctgtttagcagagccattctctgctttgcaagtagcggctccaaagcttcgaagactataatcgagttccattggcttgaggcaatcaaagaagagcctttcaaataagtgtgccgtaacttcatgagcgcgtgagactgccattttgacaaggagaaggtgttgggaagagtcgtaagaattccagcaacgctgaaggatactatcgtccgagtttaggaagtcgcgactgaaggcctgcttattaaccttggtgaagagcacccattcactggcctcaaattcctcttgttggcgatttagttccatctttacagtttctagaaattgtttagttcccttgtacggataccttctgatcgggggtcctagatcaccgagaaagctgctgctagagctctcggtgtctagctcaaactttgtgttcgaggacatgatagccgcaataataccgtcccgtgttagtgtgaaagaagaaacattcccatattgactgtaggcattaagaatcgtccccgaggaccacctgacgctaatgtgacgtagccttattacgaccttcagcgcaatagacatatacgtgcagggccaatagaactattcttccccaaagttagcggttagtcttagtcttggagaatgaagtttaaagaggctgaatatagacatgatatggaaaagatcttgagaaaaaaaagtcccaggatggcattccgattgccgataattgtccgaattggtgacttgctcacgatttactgatcacagggatatcatgctactgaaaatatcgagattatgccggaatatattcaaacagattataatatctcagtagacatatctgatctggccttgggccaaccgccggttcatccacccgtaatacagtctcaaagaaacacatacggaacaagcaagcagcaggagcgctgcgttggtccagtggccagtagggaagcctttcttggcttgattggacttgtagatccagacacctacgatttgaccaggcgctccgaaggaaatattcatcgcaatggccaaaccaattccagccgttgagcggagattggaagacagccagcccagaagaggaggaatgcatgagaatgcacccgaggtagcgacaatcaagcatccatagcggtgctggtgagctgatgttaacatatattcgtttacagtgttgtgcgtagatcagaaattgctcaccagataagcgtctgcaggaaggacagcggaagctaagaaacccatagcaccaataaatgagaagatagcagaatgcataccgcgactgtatcttgattagcgatgccaattgattgggggcctgaagagggggaacgaacgcattgaagtagtctgcagaccaggagaccgcaagagttactacatatgcaacggcttatggaggaaccgtcatcaactgagcctgtagattttcataacccaaaccggcggtgatggttggtgtgaaaagtgacagactagaaaatggcacggaaatggaaaagtatacctaaaaatatcagtcaacgaatgaatccaacggtttcccccgaagacaccttatacataccagataatgggcataaagtcgccattctgtcaacactgccttggcttcactccaggtcattgctttggccgcaccctggcctccttccacggcgagtcgctgtttagccagtgccttgtcctccgcagttaagaaaccacaagtctctgggtaatctggaagaaagaaccaaacaaggattgcagatgcgcacgaaggcgcgccttcaatgataaagagccatctccaggcggaaagaccccttacaccattcatatgcccgactccgtatgcaatggctcctccaaacgcgcctgccaaggtggcagaagccaagataaacgcgactctcaatgatcgttccgacactttataccaaaatgtgaggtaaaatactagtccagggaataggccagcttcaagcaccccgaggagaaaacgaactcctgcgacttgtgcgaaattctgggcacctccaaggcccatggtgactgcgccccaggagaacatgaggaacgcaatccagcgctataatttgcaattagcttaagttggtaaaccacatgggacggttactaacacttggtttcaatttcttgaggaaatagttggaagggacttcaaagagaccgtaggcgatcaagaacaccattagagcgatgctagtttaagtcagaagtgccgcgaagtatgggaagtcgcattgcctcacatgtattggtggtctgtcatattcgtttcgtcgagcaaatcattgcctgtgcctgagttgagagtcttcgcattgcctgttttgatcgacttgtcagtactggcgctggctaattggcatactgaatccaaacataccaacattggaacggtcaaggtaacaaagtagataaattccagcgcataggggtagaattcgaagatcttgcttgcgaatgagggacttttcttgctcgaagtcgacctcgatcgccggggaaggacttccattctacagttatgattagttaagatacagatatcaggggtaaggatgtagtgtataccttcatccctatctccacatcttccaccatatctgctggactcttgtggttctgcattaggggtatcgaggttagggacggagaagtgcagcaatctggggtagctaaaatccggggaaagcagtttcaagatatacacaattccccaaccgtgccccatagtttaatttttcggggtaggaggccgtctccgatggctaaacggctaattgtggccaactacggtagcctaaacgggccacatttgaaaccctcggtgatacttactgtcttcaccgctggagtttccgcctttgtaatataccgcttaatacagtccgcgtattttgaaacttagacactgaacacccacgttaagcgtcacatccagtgcagcgtcacatccagtgcagcgtcacatccagtgcagcgtcacatccagtgcggcgtgccaacagttttcccttcctgcctccgcagtagttggtggaagctcgatcaacaacgtcgatgactccaaggctccatccgcatctacgtcttacattctgagggctgtgctgccggtgtagcgaactaagcctagtaggccaacatggttctggctgggggtttcgaactcctactcactactactaattctcccccaaaatctgttcacttcaactaatgcagacttacaaggcttcattatgacttatgttatgtaaaggcacagtctggaagcaattgaatatgaccagtggattccaacatatgattacctacggagtagtaaaagtacttctatccatggatccatggatgcttaagggtacgttagtcagcccacgaatttcagaagattaatccgcgagacatgtgggattatcctcctattggttgatgcttatctggtttgattacattgctggtttactacaactgcccggaatggacatgaaccagttcccagatgtcgcaccagatcagcgggatctcatccaatatttcacctgccaagcatcggttatgatttcgtgtcacccacagatgcagcatgaagcctgcaatgtgttaatgcctttgtcatccgcaagtaacgctctgctttattctctgttggccttcgctgctggtcaccaagcctctcgtaccacagacgaagtcgaaaaacgacatttccgacgccagatgattcaactcgaaaccaaaagtgtacgtgatcttcaaggggagatttctcttcagcttcggtcaggtcttccccttatggcatctagtttgatactatgtctgtgctctctttgccatgagggtgacgactatatatcttggagagcccacctccgaggcgtaaaggcggccttttctattataagcgctacagaatttgcaggaaaagaatctcaaatcgaatacctgacaaagcgctatcagttgctagaagctattgcaatgcttacagctaaaggatttgaggcgctagagccgaaggacgaccagtaactatcctctcaagcctttttggacgatcatgtggcttgttacaatgaagtcctggatatgtttcgccatattggagctgtagctttcgaccgacgcaagcttgatgttacaccgcaaaactcgattttgtccccaagtgattttgaattggaaggccaaagtatggagtctgctttgcttcgaatgatacacagagacaataatttaccgcccagatttcttccaagggtacaagagatgcttaacgccggccaagtcggggaattcaccatctgcaaccaaatttacgaatacacggctcttcttcatgtgttgacgcagacacggggatgttttcgtttggtcttgggagttccgagactgtgacaaatcttatcagattatcttatagggcgtggaaatggaggacatagcccggggcactcgacttgcagtatttgtttgttgactcgcaagagttaattttcccgagatactcatccggatttttcttggtgaagtttttgacagcaaatcggctgaccatcatgatctcgtctcccaatccattgcgggtactatgatgtattagccacaggaatgtggaatagaaaatagaaaaaattgggcgaccataccatctttgattcttcgtagctttggatttccaagttattatagaactcttcagttccaaattccttgcgccatttcacaaaggctgcgtgtcacctaaaaatcattgagctgtaaggaaaaaccccttataactcaccgttgttgagatataagattgtaaaataaggcatttgctatggtgttatgggtggcccactcgcttgtgaaatatgtcggaggaaaaaacaccgcatgttaccactagaccaaaaaggtgcacaccttacttaggaaggataactggtgtaactagttatttctcgttctgacaaaatacgttaataggtcaggtgatcttctagttagatctaggtattctgccacctagtaccatatagatcccacggtactaacattaagattccagaactcaagccggctaggtctagatcaggattgagatgatcgtggctgtggggcttggcatggagttaagtaccgtttgccgaagatgctgacagcggagatgcttggcaaagtgtctcaatgattcgaaatgggatccctaggtaaccctggactgttctcacataacattgtgcaatattacaatttgaatgccaaataatcaagcatttcctaatccataggctttcatttatttgcctggcctcagatcactgcttctgttttcattccaagacaattcattagcgtccggacaagcccagctactttggtctgtcaaattgaacgagattctcgactaatcgacactttgcgacagacccacagatcgtcatcatccgaagggttcagcttatcttgacgttttctagaacccaaagaaagatctccattgtgactgaggaaggcagcaacaatccacgatgacctagtattgatgcaggtggctgacaggccaagatctccacagcggattgtgttcatcataccacagagtcgaactcacgataaatcctacactaggcttacaaatgcacactttgaaaggtcagcgtgcaaatttcgttctcgtttagatcagatcccaggcagccaaatatcggtcatccatgggtcttatgtgggtcttattctagccacgcgtccatgtattcgctttcttcatacttggcaaaggtcttttgcttagttctggggtgctgacacaggctcggttgaaatgctttggtcaattgatactcgttaggtatgggtctttgcttattatatcttggccacagcagagacaccacaggtgatgagatacctggcggtggggctggagattcgtacatgtcgacgttaattctatataatcctacatattactgcttacagggagattgattatactttggacaataagacgaagtataatatctaggatgaagaagccgaccttgtccttcacttttctggccttgcatgcatggtttgtgtcgatattggctgttggatgtaagtatacgatgtttctcaagtgtaagctgaacatatgtctgactgtttcttacaggtgatccagtgtcagttcattttatcgaccccgtcctctctcccttgaatgccacgaagaagttcagtatcacagctgggattgagacatgcaaccaaaccatcaacttcattctagaaaacaacgatgatctcttatcacaagacgtgcagattcggtatcctgggctccatggccaagctaacgagacaggtgcgctttcgggggctcacgttcggtttacaaaaggaacagtgtggatgcaggacccctatagtcgaagtcaggataacgtcggatgggcacggcttaccgtgatccaggaaggagatagcctgctcttcgatggagcattcacaatgatgggctcgcaatacgccatagagtttgagatgctcgatgatggatctactgcgatcgtagcccacgaacaggaatcgacactctctccgatctgctcaacttcacccgagacacacttgtgtaaacgacagagctgggatccttggagcaacgaggatctcacatcaacgatcggcagtacttacggttgtccaaatacgcgaaagattgccaacgttggcattatgacggattgcacttacactgcaggcttcaactcctccgattctgcctatcgctatatcttgaatatggtcaacactgcctctgtggtgtttgagaacagtttcaatatctctcttgctatacaaaatttgacaattagtgactctgaatgcccggacaatacctctggtacgactgcatggaatgtaccatgctctcggggagatctcaacacgcgccttcaagacttttcaacatggagaagctccgtggatgatgaaaatgcatactggaccttgttgactgggtgttcgggttctgctggagaggttggcgtgtcatgggttgcagcactgtgcaacacgggatctgggtctggtgatagtggagctaccaatgtcgttgcccgaacgcagaacgagtggcaggtctttgcgtaagccacaataccagttagccataaggtggtgaaattttagctgacaggatcagtcacgagtcggcgcatacattcggagcagtccacgactgcgattcgagcacctgtggaagtgactcgacacagtgctgccccctctcgtcgaatacctgtgatgctgatggacagtacctcatgagccccgtatctgaatctggcattacgcgcttttcgccctgcacaatcggaaacgtctgttcaaggcttggctctgggcaagttgatggacgctgcttggtggactcttataccggcaatacaactggtactaacgagcaatgcggcaacggtatcgtcgaaaccggcgagacatgcgactgtggaaatggtgcctgtagcgaacaagagtctcgctgctgcgactctgtgacatgccagttgcgatcaggagatggatgtgatcagacaaataatggcggttctggtaatactgccaacactgataacaatggcaacactgggggcaggatctcgggaaatggccaaccaagtaacgatgtatcatcctgggttcaaaatcatcttccgttggttattgggctttctgctggtattggtggggctttattgctgcttatacttggatgcttgattttttcctgtaggcgcagccgcaggcgaccagtggtgaataacaagcctgttgcaatgcctccacctcaatattcttagaaatgaattgttgtcaataacagaggtcatagccgtgatataatctttcggagcaagcttagcaagagatgaaattctgatcatatatatttccagcttttaggaacttaatttttggtaatttttgaaatgatatgaacaactctataacgagagatcagcgatggctacctttagctgtctgtttcacccacaataacgggccgcctggaaaccaatatgtaccggacgacatcataattagatacaaaattggtagatcgtaactatgatttatatggcccacgttattgctgatgggttctttcctccgcgttttgatccatcattagggcaacggaaacgcacgactagtcggtaagcgagtcgccatcctccccgaaacgcgtccatgaattagcacttggtcaattcaaccacccatcatgccaccaattcactcccaaaccccaagaaattcagctgagcaggagggtaggatcttactggctgtctgggctatttaaaaacacgaaatagctacgatcacccttggtgctcgcatatttgatgtgcctcgatccactttactacgatggctctcgtgataaatagggatccgcaagataggccatctaaacctgaccataaaagcctagcagagctcttaattggcatgaatttgatgctgaccatgagggcaggacttgatggctttcagcatagaaggtcagcatgccgcagcgagaagtaaggactaaacttaccgcaatactattgaacatcggcacgacatacatgaggcatttaccatcgggaagccttattcggttgatatacttgcctatgggaacgattttctctatcaccaaggatacatctgcgccctcttcgatcataggtgtgacagctcaactcgccggttgtgtgggatattcgtcaggatatcaaacaacttcttcttcttcattatcaatcaacacggaatcaaagcatgatggtagcacctcagaacatggaaagacactggctaagaatatcatcgggtaagtgcaaatcagtatcttctatacctacagtttccttctatccatactgaccacatcagcagactccataaaccaagacttccttgcatattgagatggaaatgactttacactggtaaatttataacttcgtcttcagaaaaaaccatttccttcgccaaagttgaaccgtacctctgtagccccatataaatcggaccaaggagtagtacaattaatccctgcgtgacaaaacaccaagtatagcctggaatatttgtgagccaacgaatgcatgcaatgtgatagtgggatatatttaccgacggcttcaacccaataattaatgaaccatggctcgacaaaggcagaaaactgtcgctgttagtactggagtgctccttgtcacagattgcaaattaacatacgttcaatacgacggcgtagaatgtcataatctcggtaatatgttccgggtagcaatcgaaaatgtaggtcgagacggcgcaatttccaatttgcattccagcagagactaagtaaagtaaatatcagtcatcgtttcaatacacattgtccgctatattctcacatagaaagaaagcgacttggcctgtgatccagtgccattggcgatcgattgaaaggccccaaataattgttcctaccgatgcaaggaccacacccggatacatcaggtagagtcgcatttcgggagttcggatgttgttatttgctgtcgccaagcgggagcaaatcatgtcgctaagcctaccggaagtcaagagctcggctgcaattgttccaactataagaccagagaaaagaagtccctggatttcaggctgataactggagtatgcggcaggcaccatggtcatgaaggacaagaccctattcaggcgtaagtatggactcaaggtgtctaaatgccatctatcttaccaccagtacaggcagaaaacataaggcaaaacgccgaggaccagcctgggatgcgaccacatcttgcaaaatcttatgattccttgttctgggcggggatgagctacaccgggaatttcgatcgcattctggtttgggttagattatgatgcatgagggaatttgggccctacttacccaaggtttgatcatcttcgttcggttgatatcggcaaatgattgctcatttctgattcggtccaaaatcagatcgcgaggaaacagcgtttctggcaggaaaaagacttccagaattagcaagacgccataggcaattataacatggtaaccagcccagtattggttggctaaagctgtaaagcctccaactagaccgaattgttagcagtatttcacaaagctacgttgtcaagcgccataatcgcgggacatacctaggcagcccatagtacctccgatatcaagtcccataacccagaggccaatcataaacccacgctcgtgctcaaacgaaatgtcgcggatgatacttagcccaccgacaatggacggaccagcaccgatgccctgtataaggcgagtgaccatgtatcctccaagtcctatagatctgattgttgtacaacctgtcgcaagaattgtgagggcgcatgtaccgatgaggatgggccggcgaccccagcgatcacccagggcggagaacaagagcggaccgatcatcaagcctaaggagggaatggcgattgtccaattgaccatagagtaggaagcattgaattgctcttcaagtaaagagaacgatgcgataggtgttccggtcatatacacggatagaaatcccgaataacatgctataaacaaaataaggctcttctgtgatttagaccagttcagtgggtctagggggtctgtcgtcggcgaaggtgataatggaataccgtaagggtcgagctgtagtatatcggtatccagctcatcggtgtgagctggggaagtggaaagacgaggagactttttctgctcatccaagggaggcgcgtccgtcatgtgttgactcattatgagaatgttagagatttatgaacaggcaaagagcagaaaattagagcgatgaacaatcattcatgctgcctcatagtcctaggagatataatggcttttgttttttcgctaattcactgacgtatgttgtacttcgatccaggggcttggatacacgcagtgatacagataagagcttatcttgtacttatttcgctgatatcgttcttgttacgagatgagaacagaaagaatagaacagaatcccatttctcaaatgaagagagactcgatatctttgatcgtctgtatattgtagttgactcgcccaatgtacgttcatctccaatgccttccccttttggattgccaagcataattccacgggatatgattgggtggaacaacagcgcacagaccctatttagtcagcgcttagtgacttcatacaacgttgtagatagcgcatatcgcgcagggacgtatccctctattcatgcatattagcaatttttcagttcaactgcgtgtcggatgtgcttccctttttagtgtggttaggatctgcacttagacctcgacacctagaacagtgggaggacttgatatcctcaaaagcttttgcggccccttctattctcttggattgtagaacattttctaacagcagcatctagaagatgactatcttcacaggttttatagtggaacccatttctttcaatacatttctatacaagtcattgggatgtatctccatgatcatccttatgggttggctactatatcgtctgatgttttcatcgttgagcaagattccagggccatggtataccaatctgagtgttctttttctggtataccatgagtacaggggctcgaaacgactttggattcacaacttgcacttgaaatacggggaatctgtacgcatagctccaaatgaactatctttcgccagcgcgaccgcgataaaagagatttatacatctgcaggtggctacgccaagactgagttatactctctttttcaacatgggcctcacaggaatcttttcacggccctcgataagaaagaagtcggtaaagcacttggagattgagaagaatatatatcgttaactccgctacagcacaacgagaaaaaaaagagactagcggatcggtactcaaactcagcagtccttcagccagggatacaggcgctcctgcgtgatcgagcagacgcatttgccagggtttgcgccgtcaagaaaactttggatgtctatgtatgttcgtgtcagtcttttctcaatttatgtccatagactgatctatcattacagttatatctacattgctacgccctagattgtgtcagtgctattgtttttgatccatatggcacgaggtctatcgaagaaggcaatgacaacgatatggttcgtcatctctcgtatcataacagccgccctggtacgtatatcgtggagattgtaaaatgatccagcacacttattatattaaaggtttggtaatcaggcattatctaccctggttgcatcgcttctacagccgatttgatacacggactcagaagggtggtgaaatgatcgacgaatatgcttgggcatccattcgaaaagaacctcattcggtcttcaccctttccacacgactactccagtaccctgagatagggacgggaaacatggtggccgaatgcctagatcatatcggtgcgggtattgacacaactggcgacgcactatgtttcctaatgtgggaaatatctcaaccccacaatagcaaaaagatgcaacgcctgtgcgaagagttgcgaatgtacagcctagaaaatggagatacactcatcgacctaccctacctaaatgctatagttcaagagacaatgagactttgggctccaggaacacagtctctgcctcggtacgtgcctgatggtggccgctgcattgacggtcactttgttccaggccatacaattgtcagcgctcagtcatttacagtccaccgaatggaccagacgatctttcccgattcggaagctttcaaccccgagcgctggcttgagatcgaagggaaagttgagaggcaacgtttgatgtttgcgttcggttccggtgccagaacatgtcttggtaaattgtgtgtctttgtgcagtattttaattgatattgatcttgactttttgctaacctactcatagtctcgcaatgtcagaaatgagacttcttctgcatgctgtctattcaagattccgtacccgacctgcggatgacatgaacgcatcgatggaaatgtcggatcagttgatgacatcgcggccaaaggacatgctatgcaaacttacctttgagcccattgagctttgaaagttgtggtttctctttattattactgcttcatccatctgtcatgttatctagataaggttatgcgaataaatttcactggtattgtattgttccatccgcggcgtgctcggattctgcacggcagaaatcgtattgtcaaattgccccattttgccgtacaccggggttgactgcgacatacggcagtctttaaatgccagtgcgagattttgcctgcagtatacatgtattttctagcataagtagtttgtacatctgaatacatcaagtgttaatttaaaggtcgtgtataatcagggtgcaatgaaaagccggcaaccttgtgagccaggcggttaaggttccctaagggactgccgatagagactgccgtactccgtcgggtcttcgcatccgccctccgatactattttccccctttaccccaacagaaaaaaattagagaatatgcaagcgtgcgatagatgtcggaggcgaaaatccggatgtgacaaagtccacccatcctgtggggtatgcagcaaagcgggtgtggcctgtgtatacaccgacagaacgaaagagcctccgatccgacgagatgtaatcgaaaggcttgaacgccgattacgccaaacagaagcgacaaatcgagcattgacagcgagattggccgctttcaattcgacttcaaacaatcagaatactccttctacgactaagagccctcaagcggaagaaagccgacacgaggtctccgatgaagtttcattcttatctctgaatgctgggggtgagcggcggtttctgggatccacgagcggtgttccttttgcagatttgataatatccgccattaaagctgatgcctcatctaatgcgcagctgaatgctcagggatccgggtctacgtcggcatctggggcgtccaccagggctgtacagttgtcgacttcaatcagagaaggaccaccagctctgccggagagtgcagctcgcgacctccatcgcgcatactttgaacatgatcacctatgctttccaattctctgccagcaatcggcaatggataatctaagaaaagtctatgcggaaccgtctacatttgaacggaaaccttacgagacattttgcttctatatgattctagctatttcagcttcgaatgttcaaaagcttcattggcagtcattgcccgaagcggaaacataccatgcacaagccatgtccagattgaacgatatcctagctttggggggcatcgtagcgctacaggcgatcctactcctctgtcaatatcaattgacaaactccacgcaaagaacatctggaagtctatggcacatggttgggatggcggcgcgaatgtgttttgagatgggccttcaccgggaagaggcgtataattatcgaaactctacaccagcctccactttaacgatgcatcctcggtggctttggtgtgtattggcaatggatcggtgagttcactgtgaacagttactgaagatgtgactctaacttttctttcgcgctcagcgtagtcagtattacgctaggtcgaccattcgcgatacacctagaagacgtggacctccaacttccagattacggaatcacacaacctttgagcacaacagaagggcatgagatacggccaacgggggagcagtaccgagaagcggtcttcgctcatataatccggtaccgtattctttgtggcagaatcatgtcatctctgcaccgaggccgatacaccaataacgaacattccgccttggctgcacaagccgagcttgccaatgacctggaagaatggcacgccaagacgagcgcattacaccttgaaagtggtgcctcagacggggccaaggtctccagtttcctgaccgttgagtggtacgagatgatctatcacaatgctctgctcatgttgtaccggccttctccagcgctcccattgaactcgtccagagcaaccgtggcagtgccaatcatatatgagtcggcaaaaaaggcgatcggtttctacgcacatcttcatgaattacagcgcatcaactatacctggattacgttgcacggtgtcttcatggctggtctttcctttgtttatgctgctggacagcatttccgcaccaagaagaaccagcgtcatggccagggatcacccatgctaagctccgatccgtcaattctggaaattgtcaacatctgccgctcttgctctagtgtcttggtggcggtatcagaacgtggggatatcgctcgtcattgccatcgtgtgttcgatcggctgagcgatgctgtgttatcagatgcggtcgaatatcacacagcacctcgacttggcggcttgccgcaaccggtccctcccacccctcctgcgttgtgcaacagtgtccctccaaatatcgccgcctcaaattacacaattgatacattgccatccgagggctggtctttccaggatccaatgctatcgtctctgcttgcggtcgatgatgtttttcgggattgttttgacgatctacagcatttccacgagtctgcgttcggtgaagaccccattggtcaactttcacaagattggttagggcagatcggtggttcgcaactacctgaaaccgacacatgagacgagtaagaaagttataagacatgttacatgatatttcaattgtacaaagctctagttaaatacatcctctctctaaaaattgtaccgggatgggaacaaccttacttctcaagtattccccaatccccttccctaagccgtcgatcctgctggagctcgcaatacccccgtccaagaagtctagtacccggaaatgaacggcgaaaatattggggaactcacacctttccacccttctatcggcatgattctcgcccttcgtccagtcatctccgaataggcttttgatccgggaaaccgtcaggaatgactgcagccaaggatattcgtcctgatttctgacgaagaaaccaatattggagttgtctgccttgtctccggatcgggcgtggacaatgtggcccaagggagctagttgcgtaggcccaaagctcgccaaatcgactgcatttgcagtctcgtaggaatctctgatatcggggtacttggaggttatcttcgggggctcaatcaaaatcgggctggaaacggtgcttcccaaaacatgtgtttggtggtcaagagacgccatcgagatgatgactgggaatatttccatgaacggctttgggtccatggtccggaagtcgagattcatatgatatccagggtagctctgcattcgtagcgcgtatattgggatcttgaacttctccgcacagatatcttccttctttttagcctgcgcgaaaacacgtaggaagaccgtgccagcctgctggctactgggatttgatgcaggggttccatatagctcgattgagaacttgctaaatttgtggtctcggaagatgtgcaggagctggttgcgcatcatctcgactttctccgagacgtcgagcccgttgatgtagaatgtagcctcggcctggtatccgcccttggctgcaatcattgccttggtcgttgccggtgggggagatccggtgataccatgtacgtgtacccgattcggggcgacctgctccatggtcacattgtggaggttggcaaccacgtccgggtttaggtactgttctccctggagttcgtacaggaattgagcgatggtgttgtgttttgtcacggctccggcatgtgcctcgggctttgtgatggtgcaacttccttcgctagtgatctccgcgataggaaatgcgaggtccaccagctcagggaggatagatttgaatccagagaagttggcacctgtcacatatggcccgcactcgatcaaatctatacttagttagtcaatttagccaattattcgctatacgaagaatactcacggcccgcaactaagccacctgcaagtcgatcccaatcatctcgagcccaattgtgccaccatgcggcagctccaatcactggtgatgcatccgtgactcgaccgcaaataatgatatcagcccccgctttgattccttcgacgataccccagcctccaatatacgccactccacagtatggctccaattgccagtccttgagtgcccaatctggatggtcgagatgcaagaggttctggcacttagcaggatcggttacagtctgggagatatcatcccccaaaaccatggcaatcaccacatccttgtggccccgcgcacgacacatctcctgcacctgcgcagccagagcctgtgtatttaaagcacccgcattagtaatgaccttgatccctttctccacgattagatcaatggattcagataattgcgtcaaaaagcccgcttcgtagcctaacgatggatcttggtctttggcaatggcgttccaggcaatgttcatctctgaaagccagtcaccgacaattacatcgacgttgccatcttgcgccatgcgccgcatggcgtgcgggctgtcgccggttgcgccggagacatttccgatgcggatatcgcgtttagggggcatactttttggattggatatgctgaaaattaaaataagagactcgcatcgatcgatctcaaggtatttgcctttctttaaagatcattgaacgatcgggctttatcggctcaatcgggttagcgctaatgtgcatcggaacccagtccgatgtttcggaggtcttggcccgacaggggagactaacacacagatttggagaagggagttggagattgttcaatatctgtttttattcggcctgatcaaaatgaagcgctctgtgctgggtcaattgccgatatctgtggcatatgaaagtgatgtagttatttccaagatcacacgcagcgcttgtttgagaacccatctattaatcatttaccagcaccatataagctagctgaaggatacttgtccttgaaaagactcccaaatgccaatcaatactgcagggctacacaaaggaaagcgttatgcttacttgaatcctgcatctttgctccagaccaggcggtacaggtggcccaccaatgaagtatacgatcgaagatctcgcaatctcgctcaatgattcttaggagaagcctctgcggaatcatcgaagtcttaatcaaaattggatcgcccgccataatatcattctgagattatcgagcccagagccaatcgcaacccgaggctatgctcgtcggatgcagcgaaccgggtcaaacgagtatcctcggctataaagcgccaaagaaatccagcaccgaatcatcgaggctgatgaacgtattaaacggcgattcatccttttgcctaacctggaacgccttaccgaaagtcgcaagtccgtgtctgttcaaactgagaccccagaggtatacacccactcaccttgtggtcatgcttcttcagttgatcctacggtgtggatcttgattaccgccttttcaggattcaagttggtcctcacttatgcgaccgtgcagggaatatgaaaagggctaaatggtccgcttgcagtttgaattgggcattcaattggcattagaggattggtgccacgatgggtgttttgagcggggattcatctctgtcattgtctgttttgcttgggctatagtttgggttatgtacatattatattggattgagttgcaattgcagaaccctcctatacagttgggttttcttacctatcgtataggctaagatggaacaatctcattgttattaacagttagttaatatgttgagggttcagattgatcctagaagtgttgatctctctatatttagtcagagcgtgtcggctatatgaaaggcatatcattggttggagacagtgtggatagccatgacgtactggaagatatttccaaggttgtagagaaagaaggaagcattgcaataattacgagtaaatcgaagctgtaaaagaatatacgcgcttatctcgtcaagtggaatatgcccaaaagggaaatcccccacggacaagtcacagccgagtcaattccaatcgcccggggagaatggacatgttgggaattggctcaacggagtattcaaccgtattcaaaggatctccacacgggaaatagcaaggtcagcaagtattttcccgagacgaagcccaatgagccggcggtattttgttccccacacgattgaaccggtgaatcaatatcggactgcccctctcagagtcatcctactatcaatctctcctttctctcaactcaccaccatgtcgcttcccattcgctccttgtcccgagcgttggttcggtcttacggtaccgtccagggttcccccagtgctgcttcattgaccagcatccccctcaccttgaccgatgctacgggtgctaccggtccccggaccaattggaccctagatgaggtcaagcagatttacgagacgccattgagccagctcacttatgcggccgtaagtgcaattcaccatatggcttgatgccgactttcagctatactgaccctatactgacccctctaggctgctgtccaccgtcgcttccatgaccccgcggctatccagatgtgcaccctgatgaacatcaagaccggtggctgtagtgaagattgttcgtactgtgcccagtcatccaagcacaacacaggtctaaaggccaccaaaatgagccccgtcgacgacgtcctggccaaagcccgcaatgcaaaggccaatggcagtactcgattctgcatgggcgcggcttggcgcgacatgcgtggccgcaagaccagtctcaagaacgtgaagcagatgatctccggaatccgcgagatgaacatggaagtttgcgtgaccctgggcatgatcgacggagaccaggccaaggagctgaaggaggccggcctgaccgcctacaaccacaacctcgatacctcgcgtgaattctaccccaccattatcaccacccgctcctacgacgagcgcctgaagacgctctcgcacgtgcgtgatgccggcatcaacgtctgctccggcggtattctcggtctcggcgagagtgacggcgaccgcattagtctcctgcacaccgtttccagcctgcccgcccaccccgaatccttccccgtcaatgccctcgttcctatccccggtactcctctcggcgaccgcaaaatgatccccttcgaccgcttgctgcgcaccgtcgccaccgcccgtattgtcatgcccagtaccatcgttcgcctggctgccggtcgcatcgcgctcaccgaagagcagcagatcgcctgtttccaagcaggtgccaacgctatcttcaccggtgagaagatgctcaccaccgactgcagtggctgggacgaggaccgcgccatgttcgatcgctggggatactaccccatgaagagcttcgagaagcctgagcccaaggctgatgccactgctcctactccacttcctgtgcactccgaggctacttctgcgccggtcgcagcgagcgcttagacttttagttagactgttgcctctatatgactgcgtcaatagtttggatcgggatgatcctgcaaaatgcaatttcaatacactcaatgaaacctaggtcctctatgtagttattccactttaggtattggtcatcctaaacccatcttaagatattgtcttgccatgacaaccttcaacttagaacccaatgccaaagaccagttagttcgctgggcttgatgcttgcatggagatcaaacctacgcgacctgtcctcggctacggagatttacacccctcatgtattccgtgggactcgtcgactggcaatgagagccacgactttaggaacgtccacgagaaagcccggtttgatgtgtggtgcagacctacatggacctcatacatatggtaatgttatgatccctgtggtaggtgaagcagcatgtgctacgggtccctctgcctgcgctgtctcggggggctacggtgatatggtggtcagagagatggggaggagagaagaagaagagaagaagagaaatgggggaaggagtccttttataccctcgacaaacggtaccttcctcgagtgcgacagctccctcgcaccttccctgacaatgtcaatgtcacatgcattgcgccttctttgtttgttcacacgaggccccaggtttaggaaggagccttcaagtcaaacaattattccttttggctttgtcaccgatctaccccaaagccattccgcatatcagaactagtcatcttgaccgttcgtcaatacctcgggctcaagctcatcatcattgtctgtctcgtaatctggatcaccaagctgaatccgcttccaagtaacctttgaagcagtcttccactcagcctgctggaagtctggcctcggctttttatagctaaaccgatccggatcgcgccccccacggatttcatagtcctcgatatgcacaaatgctcggaagtgtgaatagatgaactcgatatccaccgcttatcccgagtatcgcaaatatggcagtcgcttcatcaacgaaatcacaacggggttgaggtgaagctcctcgcacagggcctgattaatggcgtgacatcctccggggcctagacgacctccagatcgagatgtaattcagcggcaaatagaggcgataaatgtcactgatgatgttgaattgtatcggggatgcgaggaaagtcaaagtcggcaatatttcgtccttcggggtccatgactccacgtcgactttagtcctgcttgtaaattaaatcccgcatttagcgcagatcacccgcactaaataaccggccatgtctaccaattagctatcccccattttatgaagttatttgtccagtcaggtgacactccctattgagaagcggtgaacacaggcaataaatgaattgacgtcgctgctccactcttcacgaccaaatgctgaaataccgaggctcaagccgagtgcacggtgtcgactcgacccacgtcttctgagtctattcagtagaggtcaatcttcacaccacaaatcgcaatgattgtcattgatttcccttttggtgtcaatgcgactgcgttttgatgtcaggcttagccattcccaacgacataatctgcagccaatcctcaaatgagcattctctaccgtctcctgttgggtaaactgatccatatagggaagtgaacacacgtcattcaaatgttgtgtaaccagcgccctcgtgggaatgatataagcaggatggccgctgctatagatgacagagtccaactcgagcatccatcatggattctaaccatgctaaaccgttatccaaagattccatgcaatcaacatggcgcacagcacctcgcagcgagtggaacatctatcatcacatgctcgacacactcaacgcctaccccatcgacataaacaaggaggtaccagtgcatagcaaagatgataaagtgccacacatgccccagtggcatcttcaacgctgggttctcttctactccgccatccccctcctcctccacgagacctacatggcattcaccggccgcaccataagcccaatcgtcgcagtcgccttttacgtcctcgccttcaacgcgatagtgatacacgaaatgcacatcctccgacgtctcggccacaaatacggcttcctcgacggcgacaagcacgcacgggatggcatccccgacgtcggcatcggcaaagtagttacctcactatacaaactcaccggatcccgaatgatcctctcaatcgtcctatcctacgaccaaacacaacgaccctcgcagatgtcctggagctggctacccctcgaactcggactatacggtgtcgtcctcgacttctggtactactggtaccaccgattgatgcacgacgtcagctatctctggcaataccaccgaacccaccacctgaccaaacacccgaacccgctcctctctgcgtacgcagaccacgagcaggaactcttcgatctgttcgttattccgatgatgacgtactttagtctaaagctggttggtctgccgatggggttctacgagtggtggatctgtcatgaatatatcgcttttggggaggtgtttggccatagtggattgcggatgcattcgggtgtgccgtcaacgctgaactggttactggtgaggttcggggtggaaatcaatatcgaggaccatgatttgcatcatcggaagggctggcggaagagtcataactatgggaagcagacgagactgtgggatcgagtttttgggacttctatggagcgtattgaggctgtggaggggaatgtggattatgagaatacggcgaagatgcctttgttctaggtgggttgtgtgaatgatgggagattgaagggaatgctggtgtggttttgagtatcttatcatgaattatgacacttatgatataaggaaatgatggtatcgctctgtgtagtcaaatcctaatcctatatattcccactacttaggtttctctcttcttcctcttctcaaccctcaaccctcaaccctcaaccctcagttctcaactccaaaagatactacccaagcagctacaagccatcatctgtgtccaagcagaacattcgacaactcaccgaaatgttcgacttgaagctccgtcagctttgatcgaaggaatcgagacaacgaggaagagcgcgccccagtgtatagtcctatgggagacgtctatgacttttgcgcgattctagagtgggctagtgaatcctagtctcgccgcgaatccttgtactggatgtgggcgttgaggccaccaaagaactctgcgatgcgtctgcgctcacgatcccacgggattttcctagatggtctcttcctgcgaccgcaactatgaaccggcatacgtctgatctctaaatctcctctcagagatcatgggtcaatacgctgatctagagagccgctacggcgttttctatctcatcttgttttctttctatctccggtttctgatatcttaccttgatgcgaagtgactgggtcgcagtgatacagctgagaagatagaggctaagagaatctggccatccggaggataatctgccgtgtttgtccttttgataggctgcatccagatacctaagtggctctctgtttgtttgtagagaatcaacttcttctctctctctcggcttcatgagccttagaccagctctcactttactcaatgtgagactgtatcaatcgaagctgtgaatttccattcaattctgtttggcatttgacttttttcggggaatctgtatttgaattaacttatgtctaaataaaattcttcaaattggttgggtacatagctgaaagtctgaatacccaacaagtccgagatgatgcttgttgatagcacgctaacctcatccacatcgctagcctgtattgatagtcgaacgtgaggtctagatcgaagcactaaacccctgctctggctcaaacccagggccattctaccaacacctcctttgagagggattcttcacggtgttcgttgactatgtgcttgatgaagaagccttcgtttatctgcgctgagatcaacctgagcgatgatgtctagagaataaaattgagagctataattataccaaactctatcaacccagagcatgaggtcggcaagaatctcctcaattctagaagtaatatcttactagtagtatgactagtggatgcatctcgctcaactcggccatcgtccgataacgctagtgctgacctacacgaaccattacacacgatcggcaagtattttccgagccctagctagctcttcccctccgtacctagtcaaagcgtcctactagtcccgggaataccaagacaacatgtggcgtgtgtccaatccccacagtagctagcgcgaaatacgtggctctttccacgaggtggggatatatatgactgtttaaggggatgcgtcggagcaaagagagtttagtacgtgtgcactatataaacagctccactgtgttcctggtatcagggccggcgatacccacttccgcgaatgagaccgctcgcagcagcaccgcacaggacgcaggccatgtggtcggctcatgcacaggatctggcatagccggtttgatcgaccccaccgggtcggcactagtagtatggaaccagggggctgggaatgagggaaaagggaatcgagggtcgaatacggagtagtaagtatgagattattacgcacataaatttcatagcgttcacaaggatgtgtgtataggtacatattcgtgacggcgtagctgatcttacaaatctggtcctagaaactaattatacacttcaactcccgaatgagcgatccttctgcataggcggtctgacatccgagaaaacagaaatctccacctgcttcgtgatgcccggaccggatgaagtgggagaatcgggcgcgccttcgatagacgtgcccgtgcgcgctgtgtgctcatggcccagaatgcgatcgatgctgttgttctcgacatcggacttgaacctgcgcgtgcggcgcgactgattcgtctcgtttggggcaccggtcgttttgcgcccgctgaaaggcatgccgagttcgtaggtgtgggagtatttgccgctggagagcttgcgcacggaggacatgatcaaggggcggatgcaggggaccgaggaggtgattatgataatgacgttttcgatgtatccccagcggattagttcgatgccgcccgcggctccggtatttgtgatgctaggtacggagtccagtttggttgttttgatgatggacgcgatcatcgcactgtggcagggtcagtatattgtggctatacggtttgggtagaggtacttacacaatgcctaagctgagaagagcgatcaaaccgagcttgatgggtagtttcaaattcaagttccagaacacgactgtcgggaagacggccaaaaacagatcggtggctgagttgaatgtattggagtagtaggcgaatttcatcacggcattcaggttgccgcaggtcgtcgcagcggcgactgctgggtcccagagagcggctacgttgcgacagatgctaagcggtagcacggccgatgcaacgttcccggcgaattgaatcgccaaaacaacccataacgcggcctggtagtacttgtaggttccgaccagggggatgatgtagataataaatgcggagcgggcgatggtggtgctgatggtgacgatcggcacctggattgcgatggattgcgatatttttcaagaccgctgccttgtcgtctgcggttagggtgctgagattttgaccgaagccgtgccgaaccgacagggtcagaaatgcgcttgatacgattgcaaggatctgtagagcattgacgttagtcgagggtaatccacaagctagtcagggagatctgcatacctctgcgaagatcatcagtccatcatcgatgcgaaaccgattgatcttgatttttccgaccacgcgtaaaataacgatcaccgcagcaatggccaccgcagcccaaattcccctctctagggatgggccaagattttgtgacatggtgggaatataaagaggctaactggatagcattgtgaagtgatatataagagatttcagttggcatgacgggtgagagtccggaagaagaaagagcttagcagtttgtgtcatcaaccccggaaagccttggagaaaacgattggatttggaaagtcaacttaatccatcgggtattaaaccgtaaccgtggaatgctctaagatgatctgtggttgagccatggactggccaatctacgaccttggctggagtaggtttcgcgacgatcatttctatttgagtcaaaatgagccttcgagtcttggaagttgcatgttgcctattattaatccggtgcaaagtccccaaagtcaattcgtgcatggctggttctctctcttaactgcctctttgggaggattgaaaatgcgaataggacaataattggttcacgtatcataatgtcatagtaactgtcgagataaggccctataaaatacccctgaactacggaattgttaaacgaagcctcaagccacaaagcatacaatatattaaaggctgacatcctgaggtggggtttagtgggtttaattaaacaccgattggaggaatttcatctgcgttaccggcgcagtcaaacaccgttgaaatataaggattggcagaggcttcaagtaaaggggggttctaaagaagcatacagtccgaacctatatcctcctatagtggtaagggtcttggcacgaggtattcctcgtttaccccggcagaatcccgacgaaaagggcggaaggtagggctagaccaatagaagtatggcagccacgtgggcggtagaccttaaaactcacttcggaaagtaagtttgtccaatatatggggctaagcctgattgggcagccttggcactctttcccacggtcagaaaagtctggaagcgccaaccttgggattcctcaaccttcaacattccgaatcttggaatgaccggggttctctccaagtggggattcgacggggtttgcctgaagaactggatcagatcctcggcatttctggtctatccggggcctccgtgccgagattagattaaaaagctgaggttcgcaaaaggagaatagcatcatgttcttagaataacgctggaactcatctccggtcaaataactggataactatcgcaactgacatgtcgatcacgcgtgcatgaacactattatattgcacaagtccgggacttgtgcctgccgttcaacttactatctcggtcccaccccggcgaaattgtcccacatttattgattggactagacgcactaggaaacatctccgaatgttcagagattcaggttcattgcaggaatacaaagtcaatgtatatagacgggaatgatcggcacctgtgccttcatttctctccaaccttatccctttcatctcctccaccatgaagtggacattgccttccctcgtggctattgccgccccggctattgcgtccaactgtcactgtttaccaagcgatagctgttggcctgccccatcggcttgggcatccctcaaccacaccgttggtggtcgcctggttgctaccgtccctatcggtaccccctgccatgcacccaactacgatgctgccgcctgtgcagcgctcaagaccgactggaacaaaccccagacccagtaagtggtgcgagtatggcaaaattgacatcgctaattgccccagtcttgagtcctcttcatcggtgatgcaaatgttctttgccaaccagagttgcgacccatacacgtccaagaataagccgtgccgcctcggcaactacgtgaactacgctgtgaacgtctcttccagcgcgcaggtcattgctgctgtcaattttgcccgtgataacaatatccgcttcgttatccgtaataccggccatgagtaagtcgcctcaataatcctctacagataaatgctgattgatgtagctaccttggccgttcaactggtgccggtgccctctctgtttggactcaccacttgaatgatatcgagtaccaggactagtctagtccgacctacacaggccctgccttcaagatcgaggctggtgtagttggttaccagatcctcgaggctgcagccgccaaaggcctcgtcgtcgtcggtggcgaatgtcccacggtcggcctcgccggtggctacacccaaggcggcggtcactccgccctcagcagcaacttcggtcttggtgccgataacaccctagagttcgaagttgtcaccgccgctggcgacctggtcaaggcctcgcgcaccgagaaccccgatctcttctgggcactgagcggtggcggcgccggcaactacggcgttgtcatctccctagttgtcaaggcataccaagacgcgtccattgccggtgccgctcttgagttcaccgcagctgacatcaccaccgacaccttctacgaggctgtttcgcagttccatgctctgctgcccgccatggtcgaccacggtgtgactgtcatataccagatgaccaagagcgtcttcatcatcgaccccatcacagcctacaaccagactaccgatgacgtcaaagccatcctcgagccattcacctcgaagctcaccgagctgaacatcacgtaccaagccagcttcaccgagcacgactcgtactatgaccactacaacacgtacatgggtcctcttccttggggcaaccttgacgtgggcgcctaccaatacggcggacgtctgattccccgcagcaccctcgagcagaactacaacgggatgggcgacgcactgcgcaccctgacccagggcggcttggtcgccgtcggagtcggcatgaacgtctccaacccagtcaacgtctccaacgcagtcttcccagccctgcgcaacgcagccgtgacgatgcaattcggcctgccgtggaacgagaccgcgccttggtccgagatgattgcggaccaaaagaagattacgactaaatatgtgcctgcgctcgaggctgtcactcctgacagcggctgctaccagaatgaggctgatttccgccagccgaactggcagcagaccttcttcggaagcaactacgcccctctgcttactatcaagcgcaagtgggatccttcgtcgttcttctatgccctcaaggctgttggcagtgatgcctggtctgtgtctgattcggggcggatgtgccgtacttgagcttcttgagctagcagatttcatttcatagcgatttacagttcctgtttagatgttagagatattttcctattgtgttgactaattttgttaccgaagatcatgcccaaacctgcacatacacatggaatatcatctctgtcggttcttatccgaagctataatgcatctttttgtagcccttattcatcgaaaaatagtatcttaaatatgctcgaaatgctcaaagccaaatctatgtacagaaatctataaccaaatcaattgatatcgccaagtagcaagtgtacatcaaaacatatatatacaaacaacaagcctagaccgcagcattattaccgcaagagaagctgtcattagaagagtcatcatgaatagccttgccggaaacataaaggccaagaccacacatacaaccaccaatcagaataacgcacaagttcacaacagtgagagcaatcttccgcggcgaagagaaccacttgcccttattaatgaacaaccaatacacaccacccagaccataactgaaccaactcgcgaacagcgagctaatcaaactcagcaaatcactgaagacgggaatggcatcggcaataacccaggcaataacccagcaagcaagaccaatgcctacccaggaaccaatggcaaccaagtcacgcttctgcatgcggtcggtgcctcggaacatgcgcacgtagatgtacttcagaccgatgtggccgttgacgacgccggcaccgataatctgagaatgtcagctgctggatatgggatcggatggggagaacgtacagttgggatggcgattccgtaagccacctttttcatgataggacctgcggatccaagagcgggggatgtgacctcctggccgacatagtagtagatgaccaccgcagcaacgacgtagaagacaatttcaaaggtctgcagcatgaccagagccttggggaaatccctcggttcctccatctcagcgagcagaccgaagaaagccacgtgggcgcagtaggcgaagacgatgttggtgacggcgccgaaagcctggaccaaatcggtgtcgacggtagccttgagattctgaccacccttgttctgcaccccgactgcgaccatagtgatgatgacagcagtgacgatactgataaaggctgtagaagacaattagtgattattctctaagtaaggaaaatctggtacgtacacatgcacgagatataggtcatgttcttcatagtacgaggtaaagagcagacgaaacagatgacgaatccaacagctgtgaaaaccatcgtgcaagtgccgtgttcggtaacggtattcatcatgacgctgaaagtcaagatgtgggaagccataatgaaaatcgagaagagcagctggccgaggccgaacagctcgcgtccaaaagcacctaacaagacctcgccggcatcggctaaattctggatatgggggtatcggttgcggaattggtagattgtgtatccggtgtaggtagcgagaatgcccagtccgacgatcaggatgagagctggggcaaggcctagctgggcgagggtcttgggcagggacaagactccgagagagacggattcggcgatcatgactagatggtggtcagagttggttcattgtacctaatcaactgataacagttttgatcatgcgtgtggtagcacttacacattcccgtttgcctattacggaattagcctatatccttgaagatggtttcattgcgtgtacttaccaccacttcatagtcttatacttaacctcggcaccctcctcatctccaaaggcatcctgatactgtggcctctcctctagaatcttcttctcattataccccgactccgagtcagtcgggtcctggtagggtgtcactccatctggaatcatgatgtcgacgcgtatagagccaaaactggaatatagaaaagacagaaagaaagagagagcctagccacttgtatatgtgcaaaaggaaaaaaattctcgaccagaggtggatctttcctcaacgtctgagacaaccccggcttcacttgtatggagagttggagggcaaaattctggagcccggatcttctggaaggtggggatgtaccgggctgaacggtgaatgaatttatatttcctatttcctatttctaccatatttagttaatattgcggctcactgagacgaaaaaagagaaaagctttgatgccaagttgcgatcatataaattaagcgtagggagacccgcttctgaacagatgagtggagtcattatgacccgctttcctgaaaatgggccaattacagactcggctcggaattctattatctaagaagaacgccggactgcgctgctggccgatggtagccgcttccaagcttgtcccgggccaatcccgagtaaatggcttcgagctgttactaaatgccaagacgtgcagccgtataatcgtggttactctatgcaacttatgtcggttattgggaatatggatgaacggcatcgtacgttgtacaccgtacctgagagaaggcaaatcttagggctcagtagccagaagaattccagtatacaaagagcaactgtgggggagtgaagctctttcgccaccaaaaaaatcaattctagtcaagccttgccaatctcacctaggcaatggttcggttatttcgtaaagccgcatatccgaaggataatgcaggccattggggcagatgctgctatttgtttggaccaaatagacccattattataaataataactcaatgctttcctaatcgggactttctattatataccacttaccgaaatagacaatggagtctccgtacctatgtattgtgtatattgtacatcgtacctccctccacattctggtccctgcatctccagacttaccccaggttgcaagcaattcaaacgtaagtgaatgttcaaacgcgtgaataatgattatccgcactcgggctagtcgtaaaaagcactccactcgtagttatcgtggggtccgtcttgtaatttagttaatgagagtgttgctgctccacaaactcctcttacggtgtatctatccaccgaagatgaattcatgaaccaagggccggaattatccgtgaatatattgactagttgtccacacccgcagaatagccgtaccccactaaagtagcgaaggtggtcttaacgtcgagattccatggggccgacaacgtaggcttgtgcaatatactattctgtagggaatgtcattaagttgctagaattgacttaattgacttatccatggtggccacggtgtgtacatcgcatattgtagacttctaggaaactttggcctgggctttgagtagaggaggtgcctgggtgttgaattgaaattccgtctagaagctaccgtggtcatttcctcggatttcctgatgattggggtccagtcagatatgtcctcatcgtcgcagctggtgcatgtgtaacgtgtcgaggaatgtgttcagggcagtcgtcgtggtatgatttgcctcgacattagttgggtttgaggtacacatgagaactctaaaaatagcctagaaaatacattcaaagatgaacgattctaattaatctgatattccattagatcagatctgtcgctcaagcttcatctgatgaaacgtcctgactacaggggaatggagtgatcaaccagaagcagaaagatgaagattgatggaagataggaaactagctactgtacagcttcgtaccacaaagccagctagtgttagaacacttctcagaaggatatatcaaggtaaaataggttactatagcgagcatagttaccgatagatctactaaggcactatctcagtccaacaagcccatactacacttcctaaggaggtatatcggagtatacagaccggcataccggaggatcaattaatcctatatgttttgtaatttagttgatataatcatggccctgtaacaataaattgtgtgaggggggccaatacagaattccagacaattgtatactattgattagacggccaatttttacacatacagcacagtcgacatatgcagtcattccacgggtaccgtacgggaaattcaccagacgtacctgtctataccatgagtgaaattgtgagaacgcgttaataatagcttgtatatggcttggtagctccagaccatgactctcctttcgagcgagtatggctctcgggaggaaatgagtcacagcacggcttgctgaagagcacgggcggcatggaaggctatagctcatataagctcgctcttagtgctccgcctctcctagtccaagcattctaggcctagatctagatctgacagtgattgcggctgggttcttctttgatttcattggcttaagggtggtgagactcggcaaaacaatcaatctcaaccccgcaaagatcagacgaaaatgaagatctcgaagatatcgaggtattactggctggagactctcaaaaatcactttttaccatagatgcagaaggggtgacgctggaaaagttgaaaaattgtaaataattggattacagtgtggctgaccacttaacgtattcggtaagcgagctgcgcagtaaatgcaacatattccacatttatatctccacaacgacgtttcaacttgcttttattacttgtcgatagccatcgataagaacttttagcaatatatctcaatctcagagaaatcggaaagttgtatcattgcggtattgaaaattacatcactgaactataagaaatatatatatctcaatcactattacactaaatttctcaaaactccctagagtgatcagatatcatatggagagcaatatgctacaagatagagttcatattgaccacagttgttgcattatcatgttgtaatttatcgcttttactatatgatttggggtgcgcagctcgcttaccgaatacgttacgagataagactcgtgtcaatgctaatactactgcacttaactcgcctgcatgaatcatagagaggtctcgtatagcgacggcatctatcgaaccaaaaacaagagttgaactgacatacatctgcatgtcgtcggcatgacttgccttgtcttgcagccaaccacgtctagactacgttggatcctggagcaattcggcccaggcttcctaatctaaagccggcgctcggatagtcgcccgtatacaagttacgctggagtgatagtggcgtttctgattgcagtagccatgtttgcccgggcgtgcgcttgagatgtgtatgcttgctttttactagacaggctattttaggctttgctatataaccttagaaaactatctactcagggatttctctcatttattcatcttcccacttcgatctgaacactgtttctccctcaatctcatttcccttgggacatccatacgaacggacatcttcaatcctactaggggctgatcatgaagaacattcgtaagagacatgtcattcttgtcgatggaccatggtacaatgatgaaggggagctccgtgagtaatcgaaagcctagtcccttgacgtgaagttacccaggctgactgagtccagactatggtagtggcggcaaaagcacaatatggcgaatcggctcagcgacgaaagagggtaaggtagctgacgataagggagacgtaaaccaggtgaggatatatcatttctatcgggcaacatgtctatagtctcataatgtgactgacatattctactgcaggttattcgatatttcaaatcgagtaaaaagtccattatcgacagaacgaaagagcttgtcgacgtaagtaaaaaaaaccaatcactatcccttctacaagctaacaaattgtggaagatttgcaaatcagcaagtacggaagatgagatatggcttttcggatttagcaagggtgcatgtaagtacaacccttcttctacaacgaagcctcaccaagctaaataattggtcccaatcagtggccattcgtgcggtggtagatctcctttgggctgccaaacgtgacgaacaccggcccgtacaacgttctttctcatcattcttcaaattgaagaaatcttcaagttcgctggttgaggtatgtcaaatgtcgtctttatccccatgccttctgatactgacctggcctctattcagctcgagaaatggtaggaacggaactttgggacttgaaatctagtccccttgctaatgtatttaggattcgtgaaagtggagcaaagaaatgcctgccaaaactatgttttgtaggactatttgacacgatacatgattcatccgtcgatcaatcgttgcaatggccagcctcgatatatctttatcatgcagcttctatgcatgaagatgataacacacttaaggttcgtctgcttagtgaggatgcatcaaaaaacgcttatgaaacacccaaatacgttgaagcgtggttcgcgggatctcatatagatattggtgggggcgcaaatcaagatggactttctctttatccactgcagtggatgttgatcgaagcccagaaaaaaggattatgcttgaacaagcccattttacccgataagaaggaagggcaacttgttgaggacatagtgcaacttgtttttccatcaagcggaaaaaccttggactccaagtcatcagtgatcgatccctggaccttgagatatgccaataacctcacgatccagctatacaatttgcgtatttctcaccagcacggtaacttgcaacaagagcaagatcagcgacctaaaaagaacgtccttatccaagcaagaaaggagccagggaatcatcgcattcccgcaaatcagcgacacaacgtcaagttgaataaaacgagaccctatacgcaacaccgctatggaggcagtggatcaatatatcgagctatattcgcatctgaagaaaccgacacgccgtctgcgtctaggaatgaactggttggttattctcatgattgtaagtcaatcaaagaagcatctgagatgagaatatacgctcaaaccaacgtcattaggtgcttttggggtagtaatacacccttcagtatattttctgatggatatctatcctcggtatctgaaggtaaacgaattgcccagagagctttccttggacctccaaagattccgagaaacgaagttgcttaaagagaagcaatttgacccctgggtctcagcatacaatttggatcatttacccaaatgccgcatccttgtttgtggagccactggggttggcaagtctactcttcttaatgctgtgtttggcattgaattggtaagtaatgtttcagaaacgagaacttattagacagcatctaattgatagcagacgcaaacaagcgataaagaatcggtttctcacgatatcaatgaggcattggaaagcgatttgcaccccggaattatcattcatgattctcgtggtttccaatatggagaatcaaaagaagtcaatatattgagagatttcattgagcaacgccaaaagtcagcagacccaaacgagcgactagacgttatatggtatgtaatctcaaaccctggaatgttcatttctagcgctaaagttattttaggctttgcatagaagtatcctcaaaacgacgccttcaaccagcccacgctgagcttttccatgtgttgaaagaattcgattgccatacaccggttattgtagtgagaactcaaatggacaaagagcttaaggaacggcagtttgatatactcggtgcggcagcagaaggccagaaacagaatgagtcaaaagaaccaaatggactggcttgggaagtaatcaaagcacaggctgagaaggagtttttcgaggcagagcggccatttgaaatggatgtcaaaaaacatgacccgaaagcttgtgtggttcatacttcaaagggtaagatctatgactctgacctgaattcgacttttcagctgggggactttgctaaatcttacacagataccgattcttctatacgaaaacttgtcagaacgactttagaagaagttgaaagatacagtccagaaagaaaaacttctgtcgcggctgccttgaggcgtgacatggattttaaaatcggagtggccattcaaaggacgtttgacatgataaactacgatgcccacatgtggcaacgagtcatagctgcaatacccttgactgactctacaacaactcccataatgtgccgggtcctctgttctcgtattctgtcttgcttcgggctacccaaaatcccaccagacgccgcggcacacgtgttttcgaaggttattttgcgaaacctttccaggttcatgatggaaagcatcggcactgacttttggaatatcctcgctggtgccaacaagcttctcctgttcggaattgctccaatacccaaggcaatgtggcctgccgctaggatggttgttaaatgtgcctgtgatgtgatcattatccttgatggagcgatcaagcagagtggattcatggcgactcccgaaaacctgcatgaagttcaaatggcttacgcactgaattacaacccagatgagcttccgggtagtgaaaagatgactctaaggcagttgacccacaaagatgtcaatcgtgagttcaagctgagcaaagaattcaatcaaaagctggagtatcaggtcgccaggcacaaaatgatgaggattgtcatgacgcacagactcaaagagaaagctcacttccgggcttcagccccgagtttctatcaagagacagaaaatcaagacgccctggatgcattattttcgggggattcaaacacgctcggtcaggagattgatgctctagctcagcttggagcagacgggtgtatgtccggtcaatatgacgaagaaattgcagatcaatattcagaatacacgtatagccaagacatggacgattcattgtgcagaagcagtgtctgctttgatgactcggcgagttgaaattgccatacatgggtggaattatacacatttgtctacaatacctttcggatctccggcatttctctggtttaatctgcccttataatcttgactgtctcggatacttgcttctgtatatatctctacggtagcattagggttctacttcagatacaagataaggcttcatattcgaaagatgatcaatcgttgaaagacttgaacagattgagtagggcaaggacagagtttgaagttccatataatcgatttaatacggccacgctataatggtttctactttaaagagattatatgtggccagaaagccatctcgagttcctgctggcacgtagatcgtggatggacacgcgaaagaagctgcgcaggggcccgaagaaccacggaactccctcaatcggtttatctgccttgaacgaacgcgctagcggctacgacggtcgagaatgatgatggggttacagggcgtgtttggggtagatggtatgaaggtagagcagggccaggaacgttcattttaatgcggtgcaagtggtcaattgttgttttgtgtctacattcggatgggtcgagcgaaaggctcggactatgagaatgttgtcgaccgtagaagagggaacgaagttaatgggagggaatagagtaattaactagaagtagaaagataaagattgatacaagataggaaactagctactgtactaaggcttgtctatatagcttcgtaccacaaagccagccagattccatctactagaacacagaagaagtatctctacggatatataaaggagacgccgaagcgccaagctgcgcgtttgccggcaaactgtctgccagagaagagaaagagaaggaagtaatgccatacagaaggtctacaaactgcatatggcaacagtgagcacgtcagaatacgtcaccatcggactcatcatacctcttccctgccagccttgtgaaccacaacagagtcaagatctcaggccttaggattcgagcctggtagttgactcggtaaatcagtatgagatgatttagccggcacagcgatgtgacccaattcagcgtcttgatgagaacttcccgacgtctgtggtaacgaagatgatggatgtcttcgtcctttctttttccattggcgcctgtaaaataggaacgcgccgacgaaagcgagcactacgccagacgtagcaccgataccgattccagccattgtaccccttgaagtattgtgtggcgggctataggtgctcctggggcgtatgctagtactcgtgcgggttccatccgcggtactggcagcatgcgctgcttggatcgtcgcaaagccaagacctgcaatcgttggcaatgcggcactggggttgataggccagtatgcattgatcgatggacaggaaggagtaggaagcgtaggtggagggagggtatttgcagtcacggcagaccaccttttcaacgaattgtagtcggccagggttgtttgcgtgctaacctcgaagagccgcggcgcatggtggttgcagctagtttcagagatgataacgggaacccctaggcctcctagcctcgacgtcaatacatcgtagtcagaggcgctcatggacgagttgcacccgagttcgttgactgcatagaagtcgatagcctcgtcactttttcctccgcacaccaagtattctcccaacgtttggatataggtatactctgaatctgtggcgtatccaataggtatagcgcggtacttcctagcagcagcataagctttcatatcccgggctgcggcctttaggtatggggctaggtcgactgtagggcctatgtcatacatttagtgagcgcaaagactgtgagcggtgggtttcataccttgaccagtaatagtttggctggaaataatattatttccaataagaagccccaggagattgctatacccggccattgaatcaagaacagccgcatattgttcgaaaacgcccatttgccatggtgagttgaccttgcagagatgttagtatccataaagaacacacgaacaaccgaaaatgcttactatgttcgagctgacatctgtccaagccctttgagtcgccatgtttgcaatcacgtatattccattgtcctggaaagtctgcatgcatttatcgtgaccctgagtcgcatctgtatagtacaccctgatagtgttggccccgagtgccttgaggataggcgcatcgattgcgcactggctagccctcgaatctgccaaaacatcgattgtagtcgaaccagaggcatctccgatgtaatcgacacctgtttcagatgttatcttggcttggcatcgataacacagttcaaatgatcttacctttgatctgaaatcgatggcccctactcaataacccattccccgcgaccgagataacaggcagtgacatctcaagacacgaagacacaaaggtggcaggagatgataaacacggaaaagactgcgggggaagtgaaaaacagggtccgaggctatatctagggcgccatggcccctacataggcttgcccaacccggtatagcgcttacatgtgaagcggtttttaagattgcaataagcccggttgataacgaatcctaccttgaggtcatggcgtatcttatagaagtccaactctcacggatataaactgtggagctacagtcccttgattgtaggatccattcatccatttttgcttcatattgctccgcgttattaaatcataaggtctttaggtgttatgtacgccagcggccttccagagccagccccggacctgcaaaaactcgctcagagctcagagctctgtctgccctattcgcaccctaacaacacttcgcacccacggaacttcccatttactactcgttcgcttgcatttttactcacattaaggatgacacggtgaagggaggccacaaacggccgcttttgacaccattttaagccgctcacgtggccggtcttggcgtcacgtgcaccaaagcccacgacccgctgcgggttagccgtgtctggttctacgtatcttcaacttcccctgtatatacatacatacactcgcaagattgaatccatgtttctgtaatggggctcgtcgaactacccactgagatcctgtggatcatcgcatcatgcctttgccgctaaacggatatttacgccttcgtccacaccaatcgtgatctatacgaaagacttatcaagtctctatattactttcacgcccggtatagacatggagccaggctctggtttctcgcccagcggaacctctttttacaagttcaaagtttgctagacgggctaaatgctgccagcaaccagcctccagcatcccgggcagtgatagaagcaacggaacggaaacctataagaatgtacgaaaaaggcacgatgctaagaatgtaggaagaagaagaagacacaatatacagaatacgagaaagtctggaccctatggatatttctacccaccctcttctccaacagggatacagcatcctgggtattaggaatatccagcatgctctagtgctggcaattaagggtggctataccgaaactgtgacccttttactagactttggtacataggccaacttctacagtagggaatctatattggctacttacaattagtggtatactaaggcgattgattacccgcccctctttactgcggtatagcacgtgagggtagaactagtgaagttactgcttcagtgtggtactgatctagagctatttgccccttcaccattatatcgtgctgtcgaagataatggacgggaaattatccctatattactcgaatacagtatagggccgtaagtaatagcgttaaagctagctatactaaacgaggataagtctatagtgagatttcttcttaatagaggattcaatatttcaaagtacggacatactggactctatacagctaaaatgagggtgacaaggatatgatcgacttattagagtctcggggtgtaacattagctgcacttactaatgctgaaaaggaaaagtgggagacggcagacggggatggcactctgcctctttttgataatgtgtttatttccttcgaggacgaggtcgatctggatgagggtgagggtgaggatgatgagttccggaattagtatgagtattgatgggtacattttcctgcatcacatattttcaaattggttccctttatttttttctctcttatattcctgattgtacaaacgaatgcacaactgcacaactgcacagtagatatgattaggtattcacgtctatagtacctacactaatgctgaacggaggagacgctccagttctcgtagcgactcgggcttggaagtgacactagacatcaagtaaagcacgtttccaaggacgcgcgagtgaacattgaactgatcaccaccaacagccagcttctgctgcagtccctttgcagcattggagttgtagcctgtcatatattagctttatcaatgattcaggtctgaagaacataacatacctccaccagctgcatcacgcagtgagatactcagcacggttccaatggcgaacacgctctccacggacttcgtggaagagaggtcctcaagcagaccatgtgaccagacactccacacctcgggagctgaagattcaacagtagcaggcgagctgctacgccagtcagcgcggtatgcatcccacgatccatcggtatcaagcttggccatggtcttcaaggagtcaacagcgaccgtgcatccaactgcatgggcggtgtaactgtggccgtggagaagggcatcgctcttttcgggactcgagaaagcattgaagatttcctcgctagcgacagtcgtgcagagtggtaccagcccgcccgtgaggagtttggcgttgacggccacgtcggggtgcactcctaagaaagaggcggatgtccgccgaccgagacggtacaatccggtgaagacttcgtcgaagatgactgggaggccggaccacgacggggattgtttgggtgcggtagcgttgggggaaaacagctctgggtggtcgcggaccacatcggtcaggcatctctggaagagagggtcactaagggaatcgttagttcatgtaaatgaaggatcgtagtggattcttaccagaaaagcattccacccgcaccgaggatgaccggttccaagatcaatgctccaaacttcactccttggcgctgaacgagatcttcaatagtgcgacggatgtagtccttgtaccgctgggcagtggcagactcaagacgctggctgaggtcaaacaccgatcccaaggaagcgaaatcaacatcctcgccgagttctccctgcagctcaccggggatctcgactttccaagatccgccaaccatcttgacaagaggaaaatcgaaccagtggccacgaccacgataccactcaaccttcttattgaatgtcgaaggttccgaacagtccatcacaccgatagtatcaccgtggtagctacccttgagtccaagaataccaacctgctcctgggaggcatcccaaccgtaccggtcgcaagaagcgcgtagacccatcttcacagcaacttccatccctgtacttccattgtccgtgtagaagactttagtaaacctcgggttttcgatggttttcagtagattatccgcaagcgtcagcgctggctcatggacagctcctgcgaacatgacatgtccgtaccgaccggcggcataggcagcagatagtgctagttcggggttaccgtggcctaagccttgagtccaccaggacgcggatccgtcgaatgtcgggcgcagttcaccctctgcatctttggatgtgttggagccgaatgtttggaagtagtcatcatgcgctgagtcgatgacggtaatgtccttggccttcatgccttggtgctgggtaaaggggtaccatatcagctcttgcgcacggtcggccatctcttcgagacgctggacgcgctcggtattattgacggacatttcttcaagcaatcggagaacctccgactcctttgcggagttttggtagtagctgaacatggcctcctcgtcccttatttgggagtcggcatccagccgcgacggtctggctggaggcgctggtagcgacaccaagggaatgctctttttctggaagtattcccggaggtattcatgattttgatagtactcatctcggaacacgagaaccgatgagatatcatagccacggagaagcaacgactcgtaggcagaaatcgaagaagagataccccctagacgagagtctgccaccaacacgattggcatccgaagtggtcgatacaagtcagcctgtgagttgccattggggcccggggagtgcacgcccccggccgtctcaacaagggcgaagtcaatgtcggaccgcgcccagccggacagtgtgttgtgtatggatgcgagaaggtcatcgtctcgcggaacctgcgcgatgagctttaagtcttttaattaggacaatcgcacttacaaatttatcctttgctgccaagtgcgggctcacgggatcgtcgaattggtagagacatttggtgagcgtcccggcgccataacgccgcaagtgcctgcgaccgtcagtgaccggaattaattcaatcgaattgcttcaaagttcgcctaccgatcatcggcatcatctaatgcccccgtagaaaccggcttgaggaatgcggcgcgctgtttctggtgttgaaccgcattacacagcaccgtggagataattgtcttccccacgtccgtgttagcgccgtagacttggtgggctcgtaaactgcgccagagcgctgcgccgaccggaggcatgacgagatgaatgaagtgagtcacgatgaagtccaagagacctcggcgggtcaactgccattgagtttccgactccacgcaaatccccacaattttgcatttcaccggattgtcctgttgggtttctcaacgacttgggatcttggctttgggaattgaattggttctcttgccaatctcaacaatcaacaatattcgaatcggaaatcaagtggatagccgttgacaggaacagtacaggaacagcacaagaacagaacaggaacaggaacaaaagaatcgacgtgatcatgaaagccgatatgactcctccggggacatcgaggacagcagggacagcagggaaaacatcgcacaaaacactcgttgactcactatccgccactttgtcgcgccgggaagccaaatccgcccgtcggaggctgaccattttaccccggacagctgtggatttctcctccaatgacttcctgtcactgtcaacttcctctgcataccgagaacgctttctggcactgttgaacaacacgccgccatcattccctcttgccagcgggggatctcggctattagacgggaattcggcttacgcggaagagctcgagaacttcctcgcgacattccatcgagccccgacagcacttctattcaactccggctacgacgccaacgtcggcgtactatccagcatcccccaaccaggcgatgtgattttgtacgatgagttcattcacgccagtgcccatgagggcatgcgtctgtcgcgggccggtcctcgggagatgtttgcccacagttcgccggttggcttgagagaggctctgcagtcgcaaatagatgaagacccagctattgcggaaggcgcgcgcaatgtcttcgtgctcattgagtccatctacagcatggatggcgatgttgcgcccatcaaggagtttatcgcggttgttgatgagctgctacctcaaggcaatggatatttctacgtcgatgaagcgcatgcgactggtgtgtttggaccgcggggtgcgggcgtggttcaggaactcggcgttcaggatcgcatgttcatccgagtgcacacattcggcaaggcactagcgagtcatggaggtatgtatgatctgttttgatcgcccgttgaaataccgaactgaccatatccagccgtggttctctgtggaccagagacaagggattacctgatcaactatgcgcggagtttgatctataccaccgctctaggattcccattcctggcatcgattcgcgcagcctatgagatcctagcatctggtgaaaccgaatcagtaagttgatcatttctccatactcctaatacccagctaactggttcacagttacaacgccggcttcaggagttgatcggtcatctccgacaacgactggcgggcctccatacatatcaatcagtcatgttcgaagtcgaccatttccccacatctcccattatctcccttcgcacatcccagccgcgacagctggcgagtctctgccaggaaaacggattcattgttcgcgcgatcatgccaccgacgattcccgagggaaaggaacgggtgcgagtgtgtttgcatgcaggaaacaccgaggcggaaatcgatggtttgacgcggatgattcagtcgtggctcgatcaaagtcacagaaatgtatcaaaattataaaagtatgaggtagttgatttgcatctgggattttctactagtaatctctattcaaggccattcatttaaattgttatctcataggtcgttatccggttacttgaatgcttatatgcaaacaaacaagacgatgtttcatgtccttacaatatcagctggcaaacttcaaccaccccgtcctgctgattatggcccataatccaaaatccagcccgatcacgttgtcctgcttcgggtatcaaaatacgcggccagcccttagcccgacggtccgaggttgccacctggtcttggtacctattgcccagcctcggcaccagggatggatgtcggcgttatatgtggaatggatccgggattcgggccgtgatgcccacttattcttcgtgccaaatacctccgcaccgagactatcagtgcggagtatcgccgaccattaccgagggtgtttaaatgggataccgacgcggaaatcaactttgagatgattcggagctagtactccgtagatcaaatcaaagtacactgttgtgtaatgcctgaagtagtgtgtaaggccactatgtgcgaacttcactaattcgatctcttggccgatgaagaaagtccgtagaatttgagattttacagggcaattgttgtagaatgcatctatttctattgatttaaatcctctgtacttgaaattacttgttcattagatatctagaccatagattgctccaccttcatactagcctgggtatccgagcggtccatagtggtataccgactgaaatctctcagatcccgacggtcatcaccaggcgaaacaccattcgccactgccttgcggtcctgacgacggaagtaaacacgcttgcaccacttccagctctcaatacccaagaagaaaagcaccgtctcaacaaacacaataccccactcccaagaaatgctggtatgcttgaaaacactgtgattgataacaggaatgtagatgatagggaatgcaagaacgaagccagtcatgatgccgaagaagaggaacttgttgcgccagatatcatgcatccactgggtgtagcgtttcttagagtcgggctgcatgtggaagaagctgcggcgcagatgcatcatctcccaggcgaggaagagggcgaaccaggtcatgcaggtgaaggtagtggcgcgggcgcggaaaaccgtgtcgcagtcgtagggtttgttggggtcgttgtaatgtgtgttgcagccctgagcgagctcgccgttgccccatcggaacatgacgagggagaatgcggacagacagagggcggccatccagactccgtagacgagggtgtcgacgatgatttcccaggtgaagataccttgtttctgtgatttgttagtaaattgaattgttagggtaaggcttggaggaacttacactttgcggtggtcggtccatcacttccggggcggcaatctccattcccagacccatatcagggagaccagatgtaatcatgataatccagatgatctcgacgggggagatagggaagacagactggttggtttcatccttgaaggccaatccaataagaagggtcaatgctaaagcaacgttctccgcaagaagatgtagaacgaatttctggatgttatcgaaaatgcgacgaccttcctcaataccgttgatgatagaagcaaagttatcatcggacagcactagctcggaagcatccttggccacatctgagccattctgacccatggcaatgccgacatcagcccgcttgagcgagggagaatcgttaactccatcaccagtcatagccacaaagcgcccacgacgatgcagggcatcaatcatacggactttcgtattaggggcacagcgagcaataaccaacggaagggtgggaagttgatcaatctcatcttcggtcaatttgtcaaactgggaagccgtcataaccatagcatcggcaacgtccttcgcgatcatatccatgttcgcaggaatgatcccgacttgggctgcaatcgcacgcgcagtaccggggtggtcaccggtgaccatgtgcacggagattccagccttgtagcaaagggcaatagcaccagctgtctccggacgaggaggatcgtagagaccgatcaaaccgtagaaagacaaatccttctcgacgtcctcgcggggaagagggctgtcgccttcttttgcaggattggtgttctcgcggccggccatagccagcacgcgaagaccctctttagccaaagcctccatgttctccaagatttcatcgcgtatttcatcgttgataggaacgggctccgagtcaggcttccatttgatagtggtgcatgcctcgagcactcgctcgacagcacccttggtgaagatcatttcgcgactcttccctgagttattgtcgtcgcgctttgtgaaaataacagacattttcttcacggttgagtcgaatgggtactcggcctgttgctgccagatcggcttatcgcccttggtccagcgagacagaccccagttgaatcgagaggcgaaaacctggatggcaatgtcggtgggttcgccgcgagcctgccatccctcggtggcactttggtgaagatgggccaggttggccatggcagtgacgttgaggaagtccttgagcgtatcgttatcttttaacaagtcatctggcgatgcaacatcgcccaatttttcctcgcctagtttgaccgggggctctgcaatcaagctcagctcgccgtcttcggggttgagaggttcattcgaggcaccgacggagtaagttcctagggatgggagccaagccctctttgcgaccatgcggccttgggtcagagtaccagtcttgtccgagcagatgttggtaacagcaccgagcgcctccaaggaatccagcttccggacaataacatggcgctggaccatctgcttcgttccgacggccatagtaattgtcaacacgaccaccaaacacgccggaatcatagctagaccagtcgcgaccgcataaatgataacctcgctatcaccgcgccagtcattcgacgcagcaaccacaatcgcaaaaataacagcaatggcaaagagcagaagcgccagcttggacagtttccgctgcaaaggtgtaccaacattggtacccaagaaccggccaatggcatcagtggtcgtcaatgtccaagcctggatataccatcgcttcttcgtttcgccttcaggtccacgcttaacagggcgacgtttcgggtcggtaccacggagggcttgcgcgatagctccaatctcggttctcattccagttcccacgacgacaccgcgagcacgtcctcgggtcacggttgacgaactgtaggctatgttcagtctgtcgcctgggcctgtgtcgacctcaaaggtggcctctgcatctttttggactgggagggactcgccagttagcagcgcttcgtcagtttcgaaattgaatgcttcaacgagtctatgaagggttagcttggtattctgatattctatacgggttggtacatacctgacatcagcagggacagtatctcctactttcaattcgaccatgtcaccggggacgatctcatttgctgggacggttgccgtcttgccgtcgcgagaaactacacctgtgggcgaactgagcgatcgcagcgaatccatggtcttctcagcggcgtaatcctgatagacaccgacgacgatgttcagcccgatgacggcggcgatgaaacctccttcgatccaggactggatgccgaaactgacagccattgcgatgatgaggacctagaaattcttagcaatcattctatgatggatcttggcttctgacttaccagcatcatggcgttggcgatctgtcgaatgacaatcttcgccaaggagacgcctttgtctccttgaagcatattctcgccatacttctcgaggcgttgcttgacctccgcagttgttagaccatcgtccgaattggtctggagttcgctgatgacatcttcgaaggtgagactatgggcgggttgggagagaggttgttgtgtaatgtcaacatggctctcggagccggagcctttgtgcgacatttcgcaatatcggatggtagagtgttgtctctagttgggtgggttgagtgaattgagtgaattggtgaaagatgtacttctatgaggctcttaagggggcaacttatagaaggtatctgtaggagaatgagagtccatacaccgggattacttgagtaataggcacacttctatgaaacaaccttcttttcttttcttccgaggggggttctcaaagtataaataggatcagaataccactcgatggcgaaatgcaatcggcagttatgaccggatgtaatctgaaggaaattgtgtccgacatccggggaactagattttatgctggcgaatcaacttcatttaccacatctctgtatcaagcggacgaccttggcgcatcatcgatgacgcaaacggagtctaggcatgtccgggtgggtccccacacgacaattctcgggctctgattggtgcggaaattgcttggcataaccttggctggacaggtcgtcggtttctatctctctggcttatttcccacctctggtcttcttggctcttggcacttagaacctcttggcatttcggggctcgagggttcctccgcttcaaatccgcctctttctccggaggaattcttcaattcttacgtggcgaaacccccattatctttgtttttcgcctcagataatgggctatcaattgctcctggagacacggtgcctgaatacatgattgacccgagtgatccgatctaggttgcactgtcttacattgcgctattcctccattctcattgggtctactatcgggcgatactccaattctttatttttattttcttctcgtatcttcttcgcttgggcctaaaacccatatgaccctccactcatggcggacgattctatgccgcgagaggagatactcggggttgtgattggggcagttgcgctgttttccctgatcagcatgattccggtgtaagtacggaggcgcgagaagtcttggcaacccccgcgcttcatgcatgcgaattgttctcgaacttccgaagtgccgatcactgatttgtatgattttccgtctagcatgatcatgagacatcaccgacgacgcgccgccatacgggccatggccgcagcccgagttctcccaccggtatatcaggtacagttgcagaatgtgttgggccaacctgtgtccgtggaccgatggttggaagaacagaacgtgcctgccaatgcgcaacaatatggccaagatacttggtaagtgcgctattccagcattccaccggtctccgattccggctgcccctcctcgagccttttggccccgcggctggatgatgtcgtgtggggacactagggctgggcattcggtccctccgccctatcgggatccgcgagttttcgtggaggcggatccatggtttctgggcaaggcgttattgcgcccaaggccaatttccggtgttcctggataaacacgcgtggtcttggctagagatagcagaccgtgcaagcgactctggacacatcgactgaatcttctagaatcaagctaactcacccagccccatctgtctgtcagcactatcgtcgtccccatacctcgcctgtcccgatccagccgtgctggctgacgaccagcataatcccaacccgactacacgaccagacccccgctgcagctgcggggcacattccccgcccgatagcgaggtcctcgtactcaatcgctgcaagcatgccttccatctagactgtctgaagtcctggtttgaataccgtcggtataagtgtccgatctgccaagcttcgtattcgccagaggaggaggcacgaggatgatttccagaaataattattgacctgcatgcatgatcctgcggggttgcccaagtgcaacttgcatttggtcagcgatatgccctttgactatcggatcaatacggcttctttcttatatttttctcctttttctttacctcttttgtcttgctttgcttttgagatatccgtcaacgtgacacgacatgtttgttcattccgttctttgatctgcatttatccattgaccatctgtccaaagaggccgcagatgatcttgttttatgtatctatacgcagtcatatatactcgttatgatcgtgatgaaataggctatgtatattgaccgaatggacaccttcctagcctgttttcacagaaatgtatacattaaatcaccatcattgtactctcatcttctcatcgtccgcgattgaacaaccgggcacccaaataggaaatttatctcggcactccgcatttcccgtctctacggagacagcttctaagatattcctttttttaatttccctccacgatacaagaactccatgcataccaaggagtagcatcagaccctcctatcacacacatctcatcaaaaatcaatcaaatccctccaccatgggcttaaatgccaaagaaaccaagctcgtcgatatcgccagagataccatcaacgcaatcccaaggtcaagtacccacagtgtctccagcgcagccctctcaatcagcggccaggttttcaccgccgtgaacgtgttccacttcacgggcggaccatgtgccgagctggtagtcctcggtgtagccgccggagccgggactccgcgcctctcgcatattgtcgctgttggcgaagacggccacgacggaatcatcctcaatccctgtggtcggtgtcgacaggtgctgtatgatttgcatcctggaattcgggttattgtgcagaagggcgggaaggcggaatctgtccttattgatgagttgctaccttatgcttatgagcctagggagtgagatacgatacaattatgtgcataatggagatgccgaagtaaccggtgtggaatatactacggagtggcagtcaagccgatctaaaaatacatttcgacgaactaggctccatagttcactaatagcctgattcaatccaatcagcatagtcgcttcctagaaccgtgtcctttgtgactgccgccgatataggagtctcgtactcgcgcgcagaagtatctgacccggccccgctattgttgtactcataatagagtggtgtggcgccttccgctaatgtcgtccagcccttggcattgactatactacccaggttggagttctggtagatgacgcgagcaaggcctcgccatggacggccaagatagacagtgctatcgaggacagcactagacgcagccttgatattgcagcggtcgagtgcataccaggtggtgtcggtagttgtctggcgcgaactggcagtgatggccccagggccgttggagactatatcgcagttgttgaaccaggcggaggcggcgccgaagatgtagtccacggctcctagaaaccgttagtacttatagtgaaatagggatgtgatagagaatgacttaccctcgatcctgctgttggcgtagtattgtgttcccgacttggcgtacaaagtatcctggtatccactgaactgacacgcatagaagccgagtttatcggcattggcgacgagtctggtatagtcagtcaataattcaataccaaggcaaagaaatagatactcacgcaacagcctgcgcgcctttcccgaacccgttcaccacattgatattgtgcatcttgaacccatcggcgacaacgttcacggtagcgctcgcatccagtgagccagcctcgggcgaagatatcgtatgcgtaatggtaacagtgttctccttatatgactcctcataagtcgtctcgccatacaaagtcagagcaccggcatagttaatagtaagctgttcctcgtacgtgccgcttgcgacatagatacaagctgctgctgaggaagagccgagagcagtaagtgcagcgccgatagtcgagtatttcccactcgatccgactgtcaggcaacctgcgggggcggtggtcctagctgtgcgggtgactagtttggcgggtgcgcccaggaccgccgtgctgagggctgcgaggaggaaagcgtgtagttgcattgagagaaattggtgttttaccggagagaagggaatggtttcgggttatgtactccgtccgtctttatagaagttgtttctccaccgggactttgtatagttatgggacatatttttccgagataaagagagatttcctcttcaaggggccaatatattcaattatatccacagtccaattcctatttgtttcacggagttccaccccgttgcgtagaagtggatattcagggcagatcgtagatcggggagaacaacgtgggaaagtcaccggaggataacccattgggtaattaaagggaatttatggaccctatatctgtttgagggtgaagaaatgactttccctcatggaattattcctcgaatggcgggccagggctaaagaagaggtgtttcaggtggttttatttctccgttgacgaaacattgaaactatccacatgcgaaacacttaataagagattagagaaggtaaaaggagaagagaagttatgaaaggtataaaactagaaacgcagttattccaatcatagctgcgataccataccttcaatcaccacgcaatgtcgataacaaaagccctcgcagtctttgcgcttctcggctcatctctcgccctgccagacaaagcaagacaccacaatgctcgcgcttcatcttgcacaccagtagcaggtggatcttcctcaatcgacgatgttcccgctataacatcagcaatcgcctcgtgcggcaagggaggcactatagtcatcccatctggcacaacctacaacctgaagagcacactggactttgcggggtgtgttgactgtgacttccagttggaaggtaccttgaaattcagctcgtcaacatctacctggaagggacagacagcaatgatcaatatcaagaacattgacggacttcgattccgatctataacaggcagcggagtcatcgacggaaatgggcaagatgcgtacgcattcctttcctttttctttctttttaattctcatcccagtccactaatatcacatgtagatgggacctcttcgcaacagacagcacctacgcccgcccaaccctcctctacatcaccggcggctccaacatcgaggtctcaaacctccgccaaaaaaacccacccaacgtcttcaactccgtcaagggaaacaccaagacggcgaaattcctcaatctaaaaatggacgccacatccaagagcgacaatgagccgaagaacacagacggcttcgacatcggcgccagcacagacgtgaccatcagcaacgtgaacgtgaagaacgacgacgactgcgtggcattcaagcccggtgcagacggcgtcacagtcacggacattacctgcaccggaagccatggactgtcggtggggtcgctggggaagagtgccgaggacgtcgtgaagaatgtgtacgtgtccggcgccacgatggttaattcgaccaaggccgcgggcattaagacgtatcctactggtaatggtcatgccatgtccacagtgagcaatgttacttttactggtgttgtggttgatgggtgtgactatgcgattcagattcagagttgttatggagaggatagtgattactgtgtgctgaatcctggggatgcggacctgacgggcgttgtttttgataagttcagtgggaagacgagtgggaagtataaggctgtcacgggcaatcttgattgtggatctcttggtacttgtgatgtcaaggttagtgcttatactgttgaggcaccatctggggggagtgaggtgttgtgcgctaataccccgtcgactttgggggtaacttgcacggctggtgcctcgggctgagaataaggagatcagacctatgtatagttgagtgaagaaactgaaaagaaagttctatacaattttgcggtatataaaatgtgttcgtcatacatgtgtgatttctagcgcagtacaccagaaatcccgttctaatacttatgaggatgcaatcatcttgtccttcacgtaaaggtcgacatactggtcgacgtcgtagttctccagctgggagcggtcccagcccagcttcagcagctcatcaacacgagccttgtcaaagtgcgcctcgatgtgacgcttgtacttggccagaatctcgggcttggcctcctcgcggcggagacggtggcccagaggagcctcgacaacaacctcctcgaggacagtgccgtcgttcaaggtgacggtcagcgcgttggggatggtgcgcttggtggggtcgtggtagtcggtggtgaacttggggtcctccacacagcggatcttcttgcggagagactctagcagaggggaggtcgcggcctcggagccgtcagcgtagtcgcttgcggtcaggcggccgaagacgagcatggtggcaaccatgtactgcacacagtggtcgcggtcggcgaagttgtccatctccttgaactgcttgtcaatgatgcgaatgcatgcctcgtgtgtgcggttggtgatctccttgatgtccttggcgctcttgcccatggaggcaagcttggcattgaccttttcagcggcctcgatggcagtctgagagtggaactcggcttgaaggagttagttgttgtcaattttgtatagtgtcatttctgcaaatttaaacttaccagggtaggaaaccttgaacagaacgttctccatgacgtaactgccgtaggggcgctggaactggaacttcttgcccttgaacaggacatcgtagaagccccaggtaggagcagtgagaacggtacggagaccaccctcacccctctggaccttgagaaccaggttgacagcgcgctggcaggcgtcaccggcagcccatgacttacgcgacatggtgttgggcgagtgacggtaggtacggagagactggccgtcaacccaagcctgggtaatagcatcggcagtctgcttctcggtaagacccaacatcttggagacgacggcggcggtcgcaaccttgacgaggacaacgtggtcgaggccgaccttgttgaaggagttctccagagccaggacaccctggatctcgtgggccttgatcatggcctccaaaacatcatggatcttcaggatcttgccgttgccgaggtttccgccggcgcggttggtgcgggagatccagtcggccacagccaagataccaccgagattgtctgaggggtgaccccactcggcagcaagccagcagtcattgtagtcgagccagcggatcatagcaccgatgttgaaagcgccattgacggggtccagctggtaaggagtgcccagcacacgggtaccattggggacaacagtaccctccacaacggggccaaggagctttgtgcactccttgaacttcagagcctccaatccacagccaagggtgtctaggaacaccagacgagcagtgtcaaactaaaaatttagaattagtcggtgcttaatctaaccgggccgggtaaacttactgccaagtcggaatccaccttatagtcgtggatgtaactggccatgtcctgaatttcagtgtcataagacttgtcggtgtgcaccgccggggcggcagattgacgagcagccattgtagagaaacggggagtgcgaggcaccgggatacgtggagagatggagagggaagaagtcaaagtgggaaatctggagatgcgggccaaagtgcggggagacgtgtgggtcaggcgtctcactgcgggcaaggacatagtgaagaagggtttggaataggattgttgatcaacaattgacacaattggagagacgaagagggggagatggtcagttatttaaaacaaatcatggacgaaaggagaaatgttggggaaaaaagggagagaaaggccggggatgtgttccaagctgacttcatactgccgagggtcggttacagtcgggtattacttctctctaccctttgtacaggcctttgtatgccttcttactctttgtttatggggttgactaccttgtctacagacggtagactgataattgcactattactttttcaataggccgagttgattgctatgttaccgtcgtttgagcttcctggccaaaatccgaggatcggacataaaaggacagcaacagaccaggatgcaagatgtagcgaacatcggaatatacggtccgaatgtgcaaggaaaggacaagccaaaggagcaaaaatgttgttcgaaggagctcaccccgagctcatctggaccgctgccctcggctgatctgcgagctcacgtgcagatcatcaccccagggggccttccccaatccccaatccccaatccccaattccccaccttttctcttttcctcctttctgtcgtcaccatcactctaggatatcagtggaacattcccatggcctcttctgtatcagttttatacagagacttgacaatctctccatagatagctttggcaaagagcgggggcacggcattcccaatctgcttgcgcatgaatctcccagcgaactggaagtccaggggaaatgtctgcaacagggccatctcacgactggtatagggccgggtacccgaggggtggtagttgtattcgccacctccgcaagtaattgtcctggctagagaatggcgatcaaaagacggtcggtggctcaaagcccaacgcgccagtgccgcttcaacgttgtggtcttcggcatcgggaggaatgttgtcaatcgtggatgaaatggtctcacgcggacgtaaaccgtgaccaggcatgccgtgagtgggttgcgcataatgtggtagagcttcaccgggtctatgaacacgtggttagatatataaaattggagtatgaaaagcatcgtctttcacttaacttaccccgcagcaataagaagcagtctcttccgctcctgaggcactccatattcatcacagcccagcaccgaccagcgaacggaatatccaaactcaaccatgtccaggacaactcgattgaagataacagggaatcgttgcggtaaccccatggtttcctccatggtcaacacccggggacgggactcccgaatcagacttccagccgaaaatacgcacgccgagttagcgtcatcacgaggacagggcacagtatgagcaggggaccaggtttggcacggaggcgagcagtgtgcaatatccactcgcaggaatttcggatcgttggtaagaaaactgaaaaagtcggaatgctcgacctctacatcgtcaaaattcagctgatatgtttctagtgcatgcttatcgatatccacggcccattgtagcttgacgccggcctgcttagccccgcaagacacaccaccagcaccgcagtatgcgtcaccaaaggtgtatgcacgatcagggacagtcaaatcaatcacaccctggcgttcaagatccctagccatggaagacaccctagcctcgccgaaaggcacagtgtggcctctccattctgcacgcagctggttcgcgcgctttccaagtcctggatctgattcggcaaaggtcagccattcaatggcacactgctctgcacttaaaggtgcattaccaggaataatgacgactccattctggcgaatggtgagcttcagtcgacaagtcagttcatctcccggtgtgaggttattgaagtcagtccgatagttggtgaagcgaatggacacaacccgcctaactttcttgatgctgataagatcggtcttctgagtgagccagaccaattcattgttaagttttggcaaatatgtcttggcttcggggtgcgtggtgcggtagagatgccgtccgaaaaaaagcagatcatgaggctgagggatcatgtccttgacacgcaggaaagagccgtcttcaagctccagagatattccgggtttgaacacaacacccccaatatctatttcttgctgcattgtctccggtgttgagctgcagctggcggactggttgctgatgagagatgagttgccagaagaagaccggtcactcgataagtcgtcgccggcgacaatgacggaggcagccccaacgtgtgccatttcagaggtcaattcctcaatggcttgattggtctcatcatcgcaggtgaggtcaatgacgatctgcagtttctcggtgggctggaaggtgtgactggcctcctgcatgggtggagtggtatagatcgccgacggatccaacatgatgatatcttcgtcgagcattgtccgttcatgactgactgctcggaattctgcagtgctcacagggactgggtctccaaagggagacactgaaatacgggatcgatcattgatatcagccatcgatgtgatggttgactgatgaaaatgttccatattcggctcggatgatgctaaatccggaatcttaatgaatgcgaagaagatgaagttcgatttaaaccgatgaatgatcttagagatcttcttgtaaggtctttccggtatggtctcacgttcggatgagttggccttcagaaacacttctatttctatagccggttcagacctaacccgcgcaagtgatcacaactgatttgaaggaatcgcagggtttgccaggccttctatacataacaagtccaactgaagcaacgcaaatttgtctttgtatttctatttggtctacaaagcagagatgatatctagctctgtgcagcatgaaagactggcatagagccatggtattcattttatctcattgaaggtccgcatagctgttccaatctggtttgtatactcatctatggttgtatgtcaatatcaactctatagacgcttagcccgttccggatagtagggcatgcccggggaatgcccgggcacgtgcccataggccattgcttactcatatccccccgaagtcggcccggacgaccacgggagggaagagaaaatttctgtgggcaccgaagaaccacaaccgcaatggaatattttcctccctctctctctctctcttcttggggtggtgttcattttcagtgatcaccattctcttatcttcactccttcttttacgtgatctggtttaggtaagtcgcatgatttcattgttttcagctactttatgcaaagctgcccctctgtctcttgtgatgaattatggtattttatagatgttagacttcctaaacaattgttgcggataaacacctggactgatttgagacacttcaatcttgctatactgtgaatgcgatgtgaacactggtactaattgtcttcgtccattgcagaaaacctactcttcgtcaggatgtgtggtatcattgcgctgatccaggcgaacccctcgtctgcggccgccgtggatctccacgaggcactttaccttctccaacgtgagttccggccagaatatatatacctgcgaccgcgagactaaaggttctggtatcacagatcgtggtcaggatgcagccggtattgcgacatgcgcatccggcggccggatctaccaactcaaggccaacggcatggctgccaaggtcttccaggaaggtgctaaggtttccaacctccccggttccatgggaattggccacctgcgctatccgaccgcaggatccagtgccaacgccgaggcccagccgttctacgtgaacagcccctacggtatctgctttgcgcacaacggtaacctcatcaatgccggagacctccggaagcaccttgaccttgaagcccaccgtcacatcaacaccgacagtgacagcgagctgatgctcaacgtcttcgccgatgagctcagcgagaccaagaaggcccgtgtcaaccacgaggacgtctttgccagcttgagtcgcatgtacaagcgttgcgagggtgggtgggcctgcactgctatgcttgctggtaagttgtgaatcactcctgctgttttctagtctatggccctaactcgcgactaggctttggtatcttgggtttccgtgactcctacggtattcgccccctcattctgggctctcgtcagtccgcggatggacccggcatggactacatgatggcttctgaatcagtggctctggatcaactaggtttctccgaccaccgtgacattaagcccggtgaggcggtcatcatcgccaagggtggtgagccggtcttccgccaggtggctccccagaaggcctatgccccggatattttcgagtatgtctacttcgctcgccccgactccgtcatggacggtatcagtgtgtaccgtagccggcaacgcatgggtgaccgtctcggtgcacggatcctcgaagtcttgggtcccgacgttgtcaaggacattgacgtggtcattcccattcctgaaacggcgactacgtccgcgaccaacgtcgcccaatatcttaacaagccttactgccagggtttcgtcaagaaccgttacgtgttccgcacttttatcatgccggagcagaagacacggcaacgtggtgtccgccgcaagctcaatgccatgaaggctgagttcaagggccgcaacgtcctgttggttgatgacagtattgtgcgtggtactactagtcgcgaaattgtcaacatggcccgggaagccggcgccaagaaggtttaccttgccagttgcgcaccggagatcacacatgctcacatttacggtatcgatctagcctctcctcaggagttggttgcgcacaatcgggactccgcggctatcgccaagcatattggcgcggaagcggttgtcttccaaactctacctgatctgaaggatgcctgtgcttcggttgcccgtgagaatggtcaggaggagcccacaaactttgaggtcggtgtcttcagcggtagctacattacccctgtttcttccggttacttcgagcatctggaggccgtccgtggcgaaggccgcaaggtcaaggctgttgacaaggccaaggaggctgtcaccaatggctgtgccaacatgaccgacttccagattgccgcgcatggagtcactatggacaccaatggcaagatcatccctgccattgacaacgagtcggccattggtgccggcacgcagaccagcaactccgaagaccagcagaaccctaaggtctcggaccgcatggacatcagcatccacaaccaggctgaccatgaggcatgaggcattattacgagacatctgatttccattttttttaaatttctttttctctaccgttctggtaacttgcattgggtatttgggcgtttatttgagggagcatgtttgctgagtggctgatttgctactgtatgatatggaaatgatgctcaaagcattgaaaataccaagacccgatgtcttgagatacacttgtcaataactcttgatgaaacaaaaataaatgcaatattcaatgttgttgaaatgctgttctttcatcgttggctgtcccaaagaggcaggtcacgtgcccgtcgttggccagtagcattccctccgcatcatcgacagacccacgatgcgctcatcggcatgaatcaagcttagccctctgttcggttgaaatgaattgatacgtcttgttatatcgggactcgtatacgttgcttcacttgcaagattgaacgaaattgacgctccttctctatataatggaacgccgcattactcgttctgcagcccgggctgccactgcatggagtgcgggagaaaacagcccgtctgtcactcaaccaccaaacactactaaagggaacaaacgaaagcgtcgaacccccaataaattgaatacacccataattcaaacagtcactgaggtcaaatcctccaatgattccgatcctgcagttaaacaagaaaaaccagtgttgcctcctttgttcgatgagctccctcataacctagggccaatgccggcccctttgtctgtagcaacacagcccacagcttcaattactggatctgacaaggaaaaccaaactttagagggcaaccaaattggcaatccgtctactgagttccaagacaccgtgaacaaagctacaaccaagttgaagaaagaacccaaggttcaaactacccaaagcggccgcaagccaaagaaaaatacttatggcttgacgcccggtatctctcctttccccgaattggttcggcccactgccgaggagtgcgaagatgtcaatcggctgttgtccagtatccatggcgtagtcactgctccagcaaccattcccgagccatccctgacagtcaccgggtgtggtgaagtcccatctgttctggacgctttaatcagaactcttctcagcggtgccaccacgggcaacaacgccgccaaggcctttggtgggcttgtgcaacgatttggcattctttcagaaggcatcggcaagggaagcgtgaattgggatgctgtacggcaggccacagtgaaagacgtgtttgaagcaatcaaaagtggcggattggccgacatcaaaagcaagaacctcaaggcaattcttgacatagtccacgaagacaaccaggcgcgccgagccacattgttagattctgagtccaagaatgactcaatgtccaacctggcgcctgaaaaggctgaaaaggacaagcaatacgagattgcctgcgcagatcagaactttctctctctcaaccacctccacaatctcaccagtgaagaagccatgaccgatctgatcaaataccctggaatcggacccaagacagccgcctgcgtgatcctgttctgcctccagcggccctgtttcgctgtcgacacgcacatcttccgactctgtcgctggctcgggtggatccccgcccgtgcaaacgaagtaaccgccttcagtcacctggaagtgcgcatccccgaccatttgaagtactcgctccaccagctgttcatccggcatgggaagatctgcccccggtgccgagctgctactggccagtccagtgctggctgggtggatggatgtgtcattgatcaccttttaactcgcgacggcaagcgcaagagcaatggtccgactatggtttctaaaaagaaggctcctgctacgagcgcggttggtaagcgcaagagaatgagcaaggactccgaggaggagactgaggaaagcctgagttcgctttccgacggaacaagtgacgagtgaatgcattatgacaacgaaattatgtgaagtcaaggtggaatctttacgaggattgatcgtatcaatctatgacgacgaatggcttaagccgaatatttactctatatgattatatatttaccatattgctataggtctcaattcaagtgtgttattattgctaaacacaaagatcaattccataaatcaagtctgatatttcctagatgatcgctggtctacctatgttgtcgtatagcacaagtaccccttatcgccttatcgtaaacacgaaaagtcaccagaaactccctttactcccaacaacactttccagttgtccaattgcaccaattcccgccatgggctgtctggcatcccacattccgccctcgctgcgcactcttctggaggcctacgcgcctcccgggtcggtagagtacgccccgcacgtcggagtcgcgttgacctcccttctcgccgtgtacgtggggtacctctacatccaaagcttgagagaggcagcggtcgttttcaatgttcctatcccgtccgaaattcgcaatagcaggtcaatcaagacatgggatgaggttcaggggttgcagaaaatagtgttggaggatcaagctcagggagtgagttaatatgcctggtctttcgcttgggatcctttccttgcggtttctttttcttgttcctgcgctaattgcccttccactatacagaaatggaacaatgaattgattgtgagctactgtcctgccgatgggagggtgctcggtaacggaatcaagcccgccacggttgaagatgtcaacgaagttgttcgggttgcgggagctgctcaaccggagtgggcaaagactacctttgcggagcgcagaaaggttctccggacattgctgaagtatgtggattggcatatttgctccgccctatgaaactattgcgctttttctacgtcacccggcgaagcttccaactaacacctcgcagatatgtcctagaccaccaagaagacctcgttaccgcatgctgtctcgattcgggtaaaacaaaagttgacggctcattcggcgagatccttgtgacagtggagaagctcaagtggacaatcgatcatggcgagaaggcactgctgccagagcgccgaccgaccaacttcctgatgatgtacaagaagaacacggtcacatacgaaccgctgggcgtggtgggtgcctgtgtatcctggaactacccgttacataacttcattggaccgatcatcagcgcgctgttcaccggcaacgcagtggttgtcaagccgtctgagcagactgcatggtccgcagtctacttcctcgagatggtgcgcggcgcgctctctagctgtggccactcgcgcgatctggtccagacgctagtctgtctacctaatgttgccgatgcattcacctcgcaccctgatatcgcgcatataaccttcattggatcccggcccgttgcccaccacgtctgcacatcagcagccaagtcactcatccccgtttgtgtcgagctgggcggaaaagaccccgccgtgatcctggacgactcccgcactctccgcaatctcccttccatcgcatctatcctcatgcgcggtgtcttccaatcatccggccagaactgcatcggcgtcgagcgtatcatcgccctccgcaacgcatacgaccgactcatcgaaatcgtaaccccacgcattcaaaatctccacctcggctctgtcctcctcgacaccgcaaccccagacgtcggtgcaatgatctcgccagtatcattcgccaacctcgagaaactcatcaacgaagccgtgcaacaaggcgcacgtctcctcgccggcggcaccgaacacaaacacccagtccaccaacacggccactacttcacaccaaccctgctagtagacgtgacacgcgacatgcggatcgcacaaacagagctcttcgccccagtcttcctaatgatgcgcgccgagtccgttcctgacgcaatcgccatcgcaaactcaacgccatacgcactaggcgcgagcgtcttcggacaccaacaatcggacgtgcaagcctgcgtgtcaagaatctccgccggcatggtagccatcaacgacttcggtgccttttacgccgtgcagctgccgtttggcggcgtgcgcgggtccggatatggccggttcgcgggcgaggagggactccgtggtctgtgcaatatcaaggctgtttgcgttgaccggtttcctacgttgattggcactgggatcccgccacgcgtggactatcctatccagaaccgggcggacgcggcggacgcgaagggtgggattgcggcttgggagatgtgtaagggtattgttgagatggggtatgagttgacgatgggtgggcgtattgctggtattctgcggttgttgaggaatatgtgaggtctgttctttggaattttcaaaaatcttgtttcatatcgatcttttgtactatacatagtccatcttgcttgagtgatatctctagctatgggaatatttgactcaaagtgtattcatacttcacatctatgcatatctagaaatcttgttacttcgccaatctaaaatcagggtataacgctaacaacaaagtcctcataaactcggaacaatttcacggaggaagaggagggccgaacttcttcagccagtgatcctcagttcggaacgaactctccatcatccaattccccaatggttcccggaagggttcaagaacctcatcgacaaagcgcgagccctcgagatccaggatatccaactgaccattacagaacagctgaccagtcgggaaaccatgagcatactcaacctgcgcagggagacgcagcaggaaatccgacaaccagcgcgcaaacttcccattcatctcgttgtaggtatttgggttcgtcctcgcaagttccatattatcgacagtccacttcgtgatctcggatgaccagctaggcaaagactccgcactagcacggaggagagcctcgaagaaagccaagttgaggtgtggcttgtcgcggccgatgcgggtcacagcgaggaagtgctcggatgggatggtatagtagacgccgcggccctggttctctgatttgtagcggcaaaggaactcgtcgattttgaggagggagagcatggcgttgaagttctggtgacggattgcgttctggattccttcgtgcagggctttgcggtcgacttcggtcagggtcgagggcgataattggccctttccatgggtccaattgcacgaggtcatgcgcagcatctccaggaaagcaacgtcttctggagggaaaccgttgctgcggccgcggaggagatggggtgggaatttgcacaggtccagtgcgggcatgttgacggtcaatcctacatccacacattgaagctcagtggtgaccatcggcaggacatggagcgtgtaatcatggatccctgtcgctgcgttcggggccatccggaagaactccgggggcatgcaagcgatttccctcatcggcccgcccttcccatggaatacgcggacgctgtcgtccttacgcgctatgaacttttcaagggcagcccgttcgctttcatccgtcacgataccggcgttgatccagcgacggtagatggtgaggatctgcattgttggaacctggtcgcgcacgcggtccacggtacaccacctgcatttgaagacggcttcctgtaagcgggcgcgctcgtccagtgtgaggggaacgtagtcgagcgggaccatcatgcggtcgataaccttgctgcgggggttttcgagcgcatcgttccagaacgcaagaaggatgagagcgcggtatatgtgttcaccggagagggcgcgcgataggaacggcgaagctcgagggaagttcagattgagcgagtgtaggaagatctgctcgatgatctcaacgggcagggcctctaggagagacaacatcctgcgggaagtatgcgggcgcgagattctaggtgtgggcgaattagaaggacggtcataggggctcgatctcgaccgcgaagaccgagatgagctgctccgaatcgggttcttaaaggtacgacggcgcttcgatttggggatagcggtagaatgcgaacttgcgggcataggcggagccagctttctccgcgtcacgggttcatcttcgcgttttggtgggctcatggagcaattgaacgttcgcactatctggggtacatcgatctgtgagcttgaaccatttctgagccgtgtagggtaattattcagtgttgcagtatgtttttcgcatatcaactctagaaagtatacaactttgcaggccaagtctgtaaccccgtctgattggcggggcagagcccgacaggtgttagggctggccacttgagggctggaaggtcacatggtatcacgtgatggctccccactctgttcctaaatcgggtctagcccgttatcaaatgacgtcaaggtctatcagcaaaagaaaagttgttgaacaagaagaatgtcattccgaagggttcaacatggttaaattagaaatcagacatggagacattttaaaggctagatggcccatttaggatccaccaattgccccacaaagccagccttgtcgaaagattctgcactttggaataatccagccgaaatcaaggaacagcctggtgtcgatgtcgaaatgacggaatgatcgttggactgcccctggtgccttgtgtatccaatttggcgattgcaaactctcactccttttctctcattcctccacaaaccttgaattctgtcatagcttccccaactacgtcaccggcgtctgcaccttctgatctctgacgcctcgcaagacaagcttagttgcatgaacttgtctatcaatcgccctttccggacaccacttacaccacttacgtatctaaacaggaaattatcagtccctgtcttagatgatcaccgttgccattcttatttaaaccaccggtccatctacgttactatcttcaatatgcaccctttcagtgatccaacagtccatacacacgcctcttccagctcagattctactctcagctccaaaccgagataaacatcttcatacaaaacaaccaaacaacaagaaaactttcatcttcaatatgggttgcgtcgtttcttgcgtatgcgaaccacatctgctttctatgagatctcaactaacatactgcctctagatccaaagcgtcttccgcgccatcggtagctgcctcatggctatcgtcaatgccgtcggctccatcttgcacgccatcatcagcggcgtggtcacagtgatcgatgccatcatctcctgtctgacctgcggctcctgtggaagaagtagacgaagtcggcgatcagcagtctgataggaagcagaccatcgtgtctgtgtgcgcctcttgagtccatggggataagagggctggatatgggttctacgattgttatgccagcgcggattttcttttgtcattataccttcttggagtaaataccccatggcgcagtttttcaattgcgaattatgaatcaaattttaggttacgaaatacttcacctctatttacattgctctcttccataaatgatgtgattgtagaagatgtgtgtacgcatggtaagtcttgaagtatgaattcacattggtgagtattattctcaaaagcaagtatatcaactcccatcttctagtggagacgactcgacatatcgcaacaaatcctgctttgcatctgcgggtatatcaccccaacgctcattcaagataacatctgcgaacggatcctcaggtccactcccatagcgccggacaagggaataatgtgaatgctgtaacggccagcgagcagggacacgacaattcgcagcacggaacgatatttgcagcaagcgacgaaaaggctcgatcttgcgctttcggatgagccgatatgtgatacccgatgatcggtccggcctggcctcatcctcgtccaggtaaaagtccgcagaaagcagctgcaagaactcaaactgcgcatctgaccagggcgagcgcaagaccttgtccggaatacggccaggtccaataggcactgcgcacggcagccggaagaggtcgttctcgtggtatatctcgtgtggtttgcggatctgcacagccccaaaatggaaccagattgccactttgcggtcgacagtgcggtcgacagtgcggtcgacagtgcgcgacggggtccgtgaagtgtcctccagctgtgcggggatcaccaaatcgcctttcccgcgccggccgagtacggcccagtcacaggcttctagattttcgaagcgtgggtccagatttgagagcactgcttggtcatccgggtggaagactaggccggcacatttgcgccggatggtatgcgcaacgtactcacgctggcatttccggaacagggggagtgtgcaccaccgacatgccagcaggtcggtctgtagttgttggcgctcttgccagggcaaggcccagaagtccaaaggtgggggtaggaaatccggggtaaagaatccctctcgcgagcctaaattgggactgctgaatgcaagccgaatgagccaggtgtagagcaatggattggacagggcttggctgagacgtggggaggcacgagggaggttcacttcaagactatgaagaaagatcaattgcaggatttccacgggcagtgactccaggcgcgagcacgggtggtcggccaatggatcagacgggcctgagcccatttgcaacgtgcgtctaaaggtgatttgttattatatggcttgtatagctttttcgtagcaagacggtgttcacttgtagaatcacacggtatttttatggtcgtgaagagtcaggaggaagagcagaaacggatatggtttatctcaatggaaacacagtccatatattgactgcagacttcgcataatgttgtcctgtagctcctcgtgactcataggagaggcgcttgacaacgcttccagcgaagtctcgaatgaaaagagcaattgaaaggaaaaacccggcccattgctgggagaggggtagggcccaggggatgtgggtaaactgaggtgagctgcgtgtcttggcaaggtcagcttgagagctcgtcatcaagcgagattctgtatgtggcttaatcgtcagtgcatctaatcagattggaatagattgctgctcagtatttcttgtcagagttgcaaaaagacccgtttttcgcatgatacttagctatatatcctccttcactcaacctgctaagatatatatcggactaacaatgtttattgccttgttttctaaaccaaagcccatttctcgatcaattggtttaatatctggttgaaaagtactagattacagtagaatctattaatgaacgcagaaacgacaaatgtattgtttctatacacatcccaactgctccaccacactatcggaggtatctgaccacacactggctgaatagccgtcttcttggctccaaaagtcatgatcacgtagtgcaatggagcgaggaataaaaaggcggatttgaggccacaagagtccacgcttaaacggcggacagatcgccgaagcgctcctacataagggaatggtataagtatcgaaacagacgcattgttctcagcaagacagtcaacacataccttgtagccagggggcatccacttgcccttggagacgagggaagcggtcttctcgtcgatctcgggctgggcggcggcaacctcgtcctaaaaaagcaagcatgtgagtaatggtcccaattctgcagtctaaagcagataatacgtacgacagtgaggtcctcgaagggacgggcggtctcgatgttctccagggtcttctgcaagttctgcaactcagcctcaaccttacccttggtagcctcggcgttctgaacagcctgggcctcgaaggcgtcaatggccttgagctggcggttgacatcgtaggtagcgggcttgaaggccttgaagtggttctcgagctcgtcgacgatagcctggttcttcaggatgccgcggtagtggctgaagtcaacagtctggggttgctcggagaggacctggaccttgcggcgagcctcgtcattgcgcttcttgaaagcttggagggaggtagcggtctggccgcggaggccgagggaggtcgacaccttgacccagtcgatcttgagagcggcgctgcgctgttttcgggtgaagggagttagcgggagtcatccagacgggttgacaaggaattgtcataacgaggagcaggagcgaaacatacagcagccattgtgacgggtatgatagaggttgggggtggggagaagagaggggagttcaatgtgcagggagttgccgaacgaggagcgaccggaaggtttggattgttcaaatcacgtgatgtccattccgaaatccaccgtgtattgtataggcgacaaattataaagcgatcgtgttaattcttgtaaattacttatagacagcttatatctttgctcactaccaagttcagattgattaattgactcatccgcgggttcaattgttttttgggctaaattgtgtacactatgggcgacaacatgccagatatctccatctggaaagcataacccaagtccctcgtagaaccttaaatagggtcactcgttatatgctgagagccatgatggagttaacgatatcgttgtcgttctcccgaagagccttgacggccttcttgcgggacacgtttgcttgtgccatgaccagctcgatatccttggactcaaggttggtctcatcgacctcctcaccatcatcctcctcgtcctccttcttatcctcggtctcgggggccttgcccttgccgagaatctcctcgtggtcgtgaccggcgtggtcgccggtggcctcggaggcagcgagctgctgggcggcggaagcctgggcctgggagttcaggtcctcaatcttggcctcaccgaagatgctaaaaggtgttagtaaatgtagttcacggatgagcgagtctaattgggttccacgtacatccagcagttgctgttgggggaacggtaaacctcgggctggttaacaacgaagaggatctttaattccaacaattagcatctccatggtcagaatatatcgagttatttcatctcgttggtagcaagtgttgcgcttcatggtcgcaatcacattgtacttggcggggtagaaaatgtcatgacggtcgcatcgggatcacatacgttcttggggcggcggagagtgacacgggtgatgccagggacgagcttcaggccgagcttgccaatggccttgcgggccttcttctcaccacgagagtggatagcgacagcggcaccggcgggaatgttgggctcatcgccagcctcggagccagactcagaggagctctcctcgacggtcttggtgacctcgtcatcgtggatttcttcaacgcggggatcagccatttttgcgatgtaaaagggcctaagatgaatgcgaaaaagagttgattagttgggttggttggttcggcaatgggtgtcagggctggttgaatggtgtgagagcgggcatagtgggagagaatggtcaacccccccacgaatcgcccacaccaagggaagggcggaaactgatgttgaaaagtcgataattcagtcgagtaaacactcatacatacctgagaggtaaatatcaagctgttgggagtggggatggattttgttgaaggtgaaggtgcgtagctgtgcgccagaccgaacccgaaaatcattagcgagcgcgcgcccccagactgccctgcacacattgccctatatggaactacatcaccaattccaaactagattggctaatcatttatagatcccatctagatcaaaataaatatatgaataatacagttaatacagtttgcaggtcattatttacgtatctgctcgttctattctttttgtagagccagaagttcaatattccccgttggggggatataaaaatgagtccagagccagaggtaaaccaaatgacaaaaggcccctttgccgggatatcaaggattttgaatcatttttgctgttcattgatgatgcatacagcgattttgccagagtattaccagcaatggaaacccttccaggacacctccttcaaacccatgcaccgaaacctcgtaaccatctatgacttgttggcagcgcgagccttggcgtgggacttctggacctcgtagcgagcctagagtggtgttagttgaactgcttgtaattcccccagattatcagatcgggtgggcccaggcgcattcatgccagagcgatccccccatttcaagatgtcgaacgtacctgcttgcggaggcgcagaaccttgaagcgctcgaagtcggaaaggttcttgcggcgctcggagcggtcggtgcgctgagcgaaggtgctcttggcccacttgccatcaatctcgttcttagcccaaagcttcttcacgggaccggtaccggcagcacggggaagcttggggatggtgaagtgagtgagggtagcgtgggcgagggggagaacgtgacggggcacgatcttctgctcctcggtggagggaccgtcgaccaggacctgaacaaaaaaatcgcaagtcaatacacattcccagtcttaaagatctccgaaaatcccgagtccttcgatttttgtcacgatttccggattcagagggcgattccacatacacggcggtggtccacgatctcaacgatggcagcaagcttgccttcgaaggggccgctgcggatcagcactaggcggccaacctcaaccagcttccacgaagcgaccttgacatcgatatcggccatggcgaaattctgcgggacgaaaaattcagcgtcgcggctctgtaatatttgtagattgcacactcacggtcgacagggggtatgagtcgagagggggttgtcgaaagagttcaattgtccaagagttgtctcgaaattcggatgtgcccacactcgcaacattctcgcttaaccggccacttgcaggtctagggttctgattaggtcagcatccgcattaacaattatccgagcccgtgcatttatctagtttttttttgccgcagaacttttgttgatctctttaagctacccagctttacaagctccagcctctgatgatgagtctgcgttgctttcagtttcgacaactgctcaaatgtagcatttactaaggtatgctcatatccatattttcccctcgttttccgttcttttccccctcattcctcatatgatgccgtaatttgcgattgacccagtgtctgtgaggccctcgccggggctctctatacagcactgtcggatgatattcaatttcttacatattctgatatggattataactctcacgttatattgtcaatgctattgagagacatcgcgctgactgtttcaagatttaggacatctgccttgatatacaaggacttcttgacaacaccgcatctcttcagctttccacagggtacgttcatacaatcctccattcaacacccccaggtccgatgattagaacattttatcacgcctagatagtaattgagcttctcgctatgaaattacctaactaccaagatctctgagaacctatcaccttgcacattattgcttgttatgctggttgtgacttgtcgctaaccttcaaaagaatataggaacttctgtgtcagtctggcagtttgctgtcttatataccatcgaaatgaacaatatattagaacaacaccttgtccatcagtagttcagttggtaatcttcctaaacatccatggataacttaatttacctcggttcatccatgttgtactccgtaaatagtacatctacaaacacctcggtacaaatgcaagtagttttgattacaataagtcgtgctatatcgttacctcggccgtgcaatgccccagagcaagccatttgtcccttcatgctatgccttcctaccaacctagtctatctctcccaaatagcaaagagcaatccttccttgcccttctcgacctaattatgacgatgcagagccggtagatgccacagatgacggtccctcgcggctgagcacccacatgaaaacgaactgaaccgcgtaggagtatacgaacaagaactgaccgcgtcggttgcgctgggaccgggccacagcctgcatcgaaccggcatgcatggcggagtcggtcgaatcggggagcagcacatatttgagcgagcgaagctagagtttagacattagcaaatgcggaacgaattgaaaagcgataaagtcgtcactcaccaggaagaacgcattggccaaaaatgtgtacgcgaacaccgtccagccaatccagcccctagtctcttgtccggggttgaagatctcagagacaaccatggtgacaatgattccaacaaacttgtagcccgagtacgccagcaaatccagcagctgggagtcattgttgatgctcaaaatgtaagtcgccagcttcaagcagagaatctcaaatgcgatcactgcaatggccgtggtggtgatcgaaccgagaagctctgggtggaaatcgcctcggaatccagccagtaacaccgacagcagaatatatgtgaccagggccatgacgggaatatacatgtccggtgagttcaggtcgtcgcgaggaggcaagaacatggatgagtattgttgctgtatgatttgaccacctggtccagaagttggagccatccgggcttgctgtcgggaccagggtttgtgtcgccaagggaagaggacaaggaccagcttgttcaggacgtaggagttggagacgttaaagtagtgcttgagagcgggtatagagacatagcgattgaactgtagattatctccaggttagctataaacgatagaaatttgtagatgatgcatacgttattttccatgtactcctgtccagccgccattgcgcttttgccgacttggaagcccatctgagccgtgggttcgttcatgaacccgccgaatccgggagtaccatagccaccctgagccggtgacggttggtacgggttaccgccatatccagcactcgggggttgctggggagctggtggtggaggtgagcgcatcatagggacggtcgagacatgttgcgggacggggtgatgaagaggcggcgattgcgcgggtggcggagcgaaagagccccgatacataatgcacctgaatagggaacgaagataggagggaaaatgagcgtggaagttcggtggcgaacgtgtcgtctagatcgtgtgacgggggtttggggaagaagcgaagttgatagcggagggaagtgtttatacgtggctgaagatccaatccgctctgagctccccaacttcgcccgttccgccaccaacaagtcacaccgggctttttttcctcctacatttattatctgcttctcacattcgccgatcaattgccggagatactcgaaatgttggaggcttttgaaattttaaccacatcgggcgtggtgctttggtctaaggcctacgctccggtgggcgcacatgttatcaacagcctgatcaacgatgtcttcatcgaggagaaggtcgtgccgcagaatgctacaactaatgggatctcgccggcatacaagaaggagaaatatacactgaaatggaagagagtcaaggaattcgatttgatcttcgtggtatgtctgtcgcatgcgcatgcgctcgctgcttcgactaactctgggtttatgcaggccgtctaccaatcgctactccaccttggctggatagacaaacttcttgagaacatttcaaccatctttattgatctctacaaggaccaggtgaagggaaaccgcgcgagaatccagacctatcggttcgatcaatactttgaacagcaagttcgggagcttgaagacaacgctggtggattcgtagaagaacatgtgccagagacgggtgaaaagaaagacccgcttgtttcgtcggacaatggaggcccaccgccgccaccggtgcctggcctggtgaaaggtatggaatgacaaaccccagttttagtttcaagcgcatgctgaccatcctaaagcgcagcccagagctgcgctagccggggcgacctctgatgagggtacgccaccagctacaccagaaatttctagatcttcgacccctcagggtcatcttcttacagccaaagccgggcctggaggtcgtggctctcgacgttcccgcaaggctgccaattcgaacgccaacgcatcgtctggtgatgaagcccggaagggaaagcctgtcaagtcccctgtgaagaagatgcgcagatgggatgctagtgggatggcagatgaggatgacggagaaatcctcgattattctgcccccgcggaggaaggagagaccgtcgcccctgcggtggaggctgtctccgaggaggattggggtcgtcgaaccggcaagggccaattcgtgctgaaagagttgggcgaggaagttcaatccatcttggaccaagctgatgctgaaaagtccaaaggtactgcttcgtctggtgtggttggctccgggttcaacgcaattggtggcttcttccgtaacatcgtcggaggaaaggttctgacagaatctgatctcgagaagcctctcaaggcgatggaagaacaccttttgaagaagaatgtcgcccgtgaagctgctgtccggctctgcgagggagttaagcttgagatgattggcaagaagactggcaatttccagagtactgatgccgcattgcatgtggccatggaatcctcgctgcggaagatcctgacaccgacctcttctttggatttgctgcgcgagattaacgctgtggtcgctcccaccaccaagcagcaggcgcctcgtccatatgtcatgtctattgttggcgtcaacggcgttggaaagtcgaccaacctgagcaagatctgctacttcttgcttcaaaacaagtaccgtgttcttattgccgcttgcgatactttccgttccggtgccgtggagcagctccgcgtgcacgctgaccgcttgaaggaactgagcgttcgtgaaaatgcaggcgatgtggagatctaccagaagggctacggcaaggacgcagccaacgttgccaaggatgcagtcgaatacgctgcggccaataagtttgatgtcgtcctgatcgacactgccggtcgtcggcataacgaccagcggctgatgtcgtcgcttgagaagttcgccaagttcgctaacccagacaagattttcatggttggtgaggctctggtcggcacggacagtgtcatgcaggctcgcaacttcaaccaggcatttggcaccggtaggaacttggacggtttcattatcagtaaatgtgacactgtcggcgacatggtgggaacactggtcagcatggtccatgccacgggaattcccattgtgttcctgggcgttggacaacattatggagatctgcgagggctcagtgttccctgggctgttagtctgctgatgaagtagggacgacttgatatcctagtttgttatttctatttcttagctgtatataaatccttactttattacctgcgatcatgttgctatagtctcgtataatgaatcccccaaaaaaaacagaatctctgtacagtcaacttactgatcaaatataaagccacaacctgctaaatttgccatcaaccagccaagtgggcggggcgnnnnnnnnnnnnnnnnnnnnnnnnnnnnnnnnnnnnnnnnnnnnnnnnnnnnnnnnnnnnnnnnnnnnnnnnnnnnnnnnnnnnnnnnnnnnnnnnnnnnnnnnnnnnnnnnnnnnnnnnnnnnnnnnnnnnnnnnnnnnnnnnnnnnnnnnnnnnnnnnnnnnnnnnnnnnnnnnnnnnnnnnnnnnnnnnnnnnnnnnnnnnnnnnnnnnnnnnnnnnnnnnnnnnnnnnnnnnnnnnnnnnnnnnnnnnnnnnnnnnnnnnnnnnnnnnnnnnnnnnnnnnnnnnnnnnnnnnnnnnnnnnnnnnnnnnnnnnnnnnnnnnnnnnnnnnnnnnnnnnnnnnnnnnnnnnnnnnnnnnnnnnnnnnnnnnnnnnnnnnnnnnnnnnnnnnnnnnnnnnnnnnnnnnnnnnnnnnnnnnnnnnnnnnnnnnnnnnnnnnnnnnnnnnnnnnnnnnnnnnnnnnnnnnnnnnnnnnnnnnnnnnnnnnnnnnnnnnnnnnnnnnnnnnnnnnnnnnnnnnnnnnnnnnnnnggccggctggcccaatggcaaggcgcttgactacgaatcaagagattgcaggttcgatccctgcgtcggtcaatactttttgccctcgtggctttctttttgctctattgtcagaggagatgtggttcaactagcggctggttgggtggtatgcagtagggtgtgtggcgatttagtttttgggagtggttgctgagttattaagagcatgaaatgagagatcactatgttcagatatgtttcatatgatcaaggataccgatggtgctggcggaactacatataggaagagtgaaccattgtggatgcagggttgggggatatcaccgaattgccaatatggcacagctatcggtaaatgcaaaccccagggactagaagttgacagctatatatgtcagtggcgatggtggaggtttcaggccgaactacgtatcgttgaatgctaccctatcagtcttgttcaatatgatctagatgagtagctctctgtttgtttatatcgaatcaatcattcttctcttttattcctctcctctgggtgtgctagcacatatcaagtcaagtactttaccatattagaaggaagtgatcattctaacactaccagtggacgcaacgactcgtttgcggatccgagtacgaacaggtcgttagcatgttgatccatccctagccaaaatattattccaactagtataagactctacggcaggacaagctgcttaaggcagagttatatctcgatatagctggtgacgtcttggcgtgtgatcagtacgacagacatcgaaggctataatatcgagtgcgccgacaaaatgtaacttgatcaccaaacagtaatttaaacaagctgtttaggaattgccgccagcagtaaacatacctgcggtaatttagcgaggagtgtgttgcttgataatagtgtgttcgtggtccttctcttaaatataatgcctttgaagaagaagatccgaataatatcagagggctggtagcagacgtcgataattggacagaatttgaaacgtgcccatggccagcggttcctaatagacatcgacgttgtggtctagggaagagaagttgacgctgatctttggaagagtctcgtgacgagaacaatatctttgacagaaagagggtttttcgaaatcgaaataaacgattatcacggtgagtgaaccgggccaagttacagcgaaagaaggatacgtctaggaaattagctgtttatatacatgtgtatcaagtcggggcattgttggattcgccttcacgttcttggattgtcagtggttggcacatgttgtgatcttcttcttaactgactatcttcaagaaatccttacttggccttgggccttcgtccacgattattccttcgcaatgttttgagtatgttaaaatggtgtcacaagtagccatttcagtggctctattaccgtcatttggtgctgtggtgtaatatatagagttaaggtacatgataaagcaaggggcgccatgtttcgagtcgtataatgtgtattttgggtaatatgttgacgatatatgtgtctgcgttactgatttacatacgtatcccttaagagaggctataagagctaatggtaattatatggatgccattggcgctatgcatacaaggggtgtttccagttatatattctggggattatggcgaatcctacaaatcacatcagtatgatgcctacataggtgggcccacctaataaactgtatgatcctgactgctatagcgggtcctgtcttttccccgtaaatatccttgattttactgacttggtcttggatagaaggaaatcaagttatagctgctggaataacttgttgagcctcggcactaacgcattgtaacacaagatcgacacatgcaagggctatgaacatataagccaataaggaatcgacaagcctcatgcacctgggcaggtaaatcaaatgaataattgtcctccgtaccactacccagttaactagttagctccccaggtgctcgctctgctcgctctagggctgcccaggtgcctagatcaaatgactcagcatagatctgcaacatcgcttacatcatcattgtgtttctccagggcttgatccggcctgagatcttttgcagccaacttcaaccatccaaagcttctccgcaatttttgtttctcgacctagccctgcatctacaaatttgtcctcttggctaggcaaatattccatccgcgcaggttgaaacttataccaagaagctctcgcacgacattgcgtctacaaccagactttcagcacgaccccaagcgcatggttagctgtgacaagtcttcattcaatatttattttgctggcgtgtcgccagaatgacgggtccagacctggcttcgctcaatcgccgctcctccacgcagcattaccacaccttcgatactccgccgcccaagtcccgtgggcgacctaactcgggccagtccgagtcctctggggatggctcacacgatacccacaatgagatcgctattcccccaccaaaggcatcaccgctgccgaagaggcaaatggcagtgctagcgataatagcactggcggagcaaacggcgttgaactcgatcagtccatacctcccggacatggcttcgacattccccgaggtggaatcgacccaggtgggcgtatacgtgggcagcattgcatcggcctttgcgctggctcagtttagcacaaactatttctggggctggctttcggaccgtgttggtcgcaagccagtgatcctgcttggcacctttctgactgcgctatgtttccttgcattcggattctgcaagactcttgtacaagctattgttgtgcaggcgttgatgggtgtggtaaatggaaaccagggtttggtgtccacctgtctcggagaaatcaccgaccgtcgcaatcaatcccaggcttttacctacctcccggtgttgtacggaattggaggtataacgggaccactcctaggaggactgctcgtttttgagaccaacccttttactggcaacaaaaatccgtatccctatctcgcgccaaatatagtgtccgctgttatccttctggtggactttgttctcacagctattttcctggaagagagcctcgaagatgcagacagtcttccaaagatcggcaaaaaggtgcgcagcttgttcgcatggctatggcagttcactggcaattcccgtcacccgacctatgtggaggtccctcaagaaccgatacacccccacaaccaccgcgattcagaaaccgagggtcatgacagtgatctagattctgcgtctgagatgtcaagcatccttggccactcagaggaactcagttgggatgagatattcactcgtgatacactcttacttcttttgacatacctgatctttgctctctgcaacgtgtctttcaactcgttgttcccaatattcgcgcaagccaagcctccggccggaaggtcgctcaccccgtccgagatcggccttgctcaaggctttgctggaatcgtgacgattattttccaaatctgtatcttcaaccgtctgcgagacaagatgggcaatcgatggtcttaccgcgcaggcctatttggctttgttgtctcgttcatcctgatgcccttcattgggtataagagcaagtctagcgaagggttgactggcaagtccgccatcatggccaccgagctctgccttgtgttgctggtcaagaccatcgcctccgtgggtggtctgaccagcgctctgcttctggtaagaacttacgatatgcctctttcgataaacccaagctaataattttcctaggtcacaaactcggcacctaaccatgccgtcctcggtgccttgaatggccttgcacagactctctccgcagccggacgtgcagtgggcccattcctctccggcggactgttctccctcaccgccaagttgcagcctaaaggagaggctgtggcattcggagttttcggtgcggtctcctttatcggcttcatattgagcttcggcatccgtggccgttcacttgaggcagagggctggggcgaggacagcgatgcaggaaagtcggatgacgaggagccgagcggtgtatgattagaatacacgaacctataaaatgtgccgacatgacgatgtgacgagtttatgctttcgttccagcctgcttttgcatttgaatatacattagcccccgtttcttttatgatagatattgctgttgctgttacattacttgctgaaacaaaaccgggtgttcgattagaccttgagcctgaaggttttattcgagatattgccatgaccccgacgaataatactattcaattactggggtttcgagatacttaaacttccctttatgggtagattaaagccgagtgaagagataaaaggggaatgtctactattgtagtaagctaggctgggtggctgaaacagatatctccttttttgcaaaacattggaatttgttctctgctcatacggacataaacaacaagattttggtaaccagacagcactaaacataattcgaaactggatagagaaatttgagttgaaggagtgttgaaacgaaagagaactcgaaattgaaagataaacaagggtatatggtatatagcacataacgatcgtgacagtaaatcgtggaaaattagcgtgaaggagatgccaaaaaaactaaacagacaaaccaagcagtgaaaaacaaacgaatcaagcccagcgccagcccgactcttgtggcttttgacgcttgataacatccgacagcggggtattgccttgaccaaggggattgcgctgatttttttcccgttgacgctgaagcaaccgcacagcagcagaagcatcaatcccttcaccagtgtcggtaatcttaagagcccacttagcatcttgcgtattaaagccaagctcattgaccatcatatcgatggcgcggtcaacagggtccagaacctgcggccgcagaggcagaggcatcatagccggcggaggagtataaaacgcagcaaagccagtagtatgatcggacgaatgagtcggggtatgaggagcagtcccagcagtcgaggtcgaggacctgtcaagaacgagcgcaggcacagacggaataggccggtgatctcggatcgacccgttgagattatggacaatagtgctgaactccgacatggggcgttcagcagagaaagaaaagcggcctgtggtatcgggatcgaaaccgcgcttacggcggcgacggagctcgtgggcgaatccggcttgacgctcgcggatctcgcggtcattttcgatagggcttgttctttgcgggctgagttcggtcgggctgtcgagggcgcgttcttggagctcgtaggcgcgcgagactgcttctttcaggaatgaggagcgacttgcttcggtttcggttggttcccacttcgcgagaccgattgacttcgcctttgtgaatgtggccgcggtggtgtcggctgggcagaccgagctgagggttaagacggcgcctagaccgagagtgagaatgtaggaagtccattcctctatacttgagagttagccgtgcttaatatgagagtttggtttcgcttaccgagaacggtctcctcgcgagccagatcaccctctgggacgttcatgccatcgaaaatgccgaccttgcgagcttcaatgcattttccatgcagcggctgcaacagaacacccatgcacgtccagatctccgtcagatcgtacatctgtttctgcgatagaccggaaagattcccacgaccgaatccctcaggcggttcaaacaaaacattattcatagcgaaaggctgtgtcatcgtcgaagccgaggtgaagtgattcttcgcctggacaccacccttcaaccagtccatttggccagcgatatcattctcccgccccttcccactgccgaaaatccgacagaaggtccagagccgccagaacgcatcgtcgacttcttcagcgcgggtgttatccacacccgccagaccgcgaatggtatcgcgacgcaggaacggcgagcatcgcgcaaggaccaacgccttcagcttggcaagggtgtatatatcctgcgcgtacctctgcagatatagcgtgggcgtgtattccggaacctgggagtcgggatttagaaggagctgccactccatttcccacggcggactcatctcacgcatttcccaagcgggcggggacattttgaacagggcgttttttagcatgggcagctcgcggcctttgaacgcggtgtagatctttttgttcacgagggcgaagttgaaaaggtcatctagagagtcgatgttctgcataattgacagaatcaaatccaccggcatatcctcggggagtgggatattgactggagcattgcgcttgacgttgggagggagcgcggatgaaggagacgggggagtcgcggggagttcatagatctgttcggcgagttggacgctgcttgcctgcgcagtcgagaccagggcccaactctgacgaattttggaggctatgggcttctctagtttcacctccatggcgagaggggacaacagcgcttgttcgacttgatcgaagggattcccgggattcgtttgcagacgaggcaattgaagtagcaggctgtcgcgcgtggggggcagatcgaggggatcaacagaacgcgattccaatgtcatgagagagtcctccgaccgtgagctgacgctaactgcatcgctgggcgtttgcatttgcttgcgaaaggccaggaaggatttcttggattttgcttttttgatttcctttgtgtcgggcttttcgttaatctccttttcctccctgcccgatcgacgggccttgtccttcccctcaagtttgtggcttttttctttgcttagactcgaacccctcgatatgatcgtattcacccgactgttcttcgccgccttcccttgcggtgtctgtgagtgaggcttcgtggagggggggaggggcgcgggccggctagcaatcaagtccccattatgccggctgatctgcagcggcccgtcaaggatcagcgtcttgcgagatgaatcctggtcattcaggcccgcaagggtatcttcgagttcctcggcggcctgcgacaatgttgggacatgacgagtgcgatgactagcgagatctgaccgttgactatgatgctgcggctgagcctgactgcgtccgcatatatggcatggatggtcggattgccggtgggtattcaactggtgtaacatggaatgcttccagtcgtcatggctcaccgtagattgtcgcaacgagaacagcgagtctctcatggagaattgccttgaccactgtgacttgcgtggtgagactaccgaaaggggggagtcgggccgacttgagactgaactgggaccgaagaatggctctagtggcaagggcttgttcctgtggtcgttcattgatgcatttttagtgctggggattgggaagccgaggtttgacacgtgcaggtggcagggcgaggaaggccgcgaggaacatatggagtgggtatcgtcgaagaccccggcggcgacgggggaatagatcgagtatgcatcggcggttttatacgggtatcgtccatcatctccccagaatgtgctgccgacactggtcaccgaactgcgatggctatagcacgacgaagcacaatccaaagtctcatcagtcccagaagacgagagggtgatatccagtcgatcggcagatccatatgcatcgcaagcgaagccttcagagcgatataaagtatgcactcgttcttctagttcccgttcgaaaaaagagggccccgtcgagcggtccatattgaaatcagcgctggccggggagacaacggagaagtgtgaggacagctctggaaagaagcgggccaagcgggaaactgaacgcaatggagggagatggtccgacaatggagaaatttcagaatcgtcttgggaatcctggggtgattccaagtcaatcatagcgcccaaagattcctgcggggaggcagactgggtgtccccgaggcactcgcttgtggtgtattcttctttgagacccaagtggtgtgatttgcctcgggtatcttcactatcggatgccgtatgtgtcgagggggcctctggaactgctccagacgggccatgggtggtatccgcaatctgcactggcattgtctgtaggtctttgttgactgtcggactcgatcgatctgaaacagtggcccggactatgactcgagtttccagaccgaagggttttcttcgaagcttcaatgatagaggacgaaagactatttttttctgattggaggtcttagtcctttgatttgagggatgacgacgccgagaaggtgacattgacaggcaataagtcatatctcagctctttttctgtatcttgattcatggggcattgttggcccgaataggctgctcttgccctttgttagcatgtcacgatgttacttcaagtccccaatcatctgtcaattgcgttagaacataccttaagtccgaattttggtggaagcagactcgtggaggcgttctttgtagaaaatgattcgtctcggctgtggctgcgtagaacaaagaccagaacccaaatgttttttgtctgatcttgcaagtataggagtttgcaaagaggaaatagcaaagaagctcggaatgggaattattctctaataccgcatgacacaggcacagaccggttgatatcgtctcgaaatcagcaagtcctacggagtacaagggtctgtctgtacggagagtatggagtttctcaaaatgacatcccagccgaataagcagaccgtcatgattagtctgtcgattattggcttagtgtgctgcagctacgcagcgataccctggggtcaaaagatcaccccaatccccaattgagtaagtcgttagatgaggagtaaaagtgttgattcaattcttactagaatagctatttctatagccatagttgcatcgagcttcgtgttcatccgtactcacggcgcagtgagtttacgccccaatgataggcggtaaattgtaatacatccacaacatactgagtatatgcatgattgtccggttccccaatgaccgtgaatagctggagctgtttcggatgtacatcgtattatagtggccccagttttccgcatatggagaagaccctcccttgccgcgtggggtccaatttaaaactgacatcctatatgaatatcgcccttacgtagggcttggacttggatgatttgcgcatgcacgaaagtagctcgagtccacatcccctgcaagtgttttccccatcgtcgccttgctttcacagtagaaaaactcgcccaccaaacttgaaagcaattctagactcctggtgccaccgatgatatgtaatatgaacaccgatgaagagcccgaggaggatctagtgggacaagatactcggtagagatcctcgtaatctcgcccgctttgaccttgtttggactatctaggcaagttactcggcgatcttgcccagtgcgttaacctaaggcttctctgcgagatttgtctttcaaacatgataccccagagtggtaggactaagccacgaatgttaatgtttcacgagcggggtgttgctaaatatattcagggctaagcatttcaggaacgagaagtctagaagtgtagaagaagtagatgtgaaatacgagaacatggaatattgccatgacactactaataatagcacaggaggggctgcttttagtgctgacttgtatcttgatgtctcatgtctcttatacgaacatttttcgtctcaagggtctatacagctattcatttatctctaaaggtaatatttcatctgcaggtctctgcaatagtattttttgtccttctttgtcgaacttagaggcagattgctatcaaattccgtacgaatcttctttatgcaatttagtatctggtacacacatggcagtgcttaagcaaataaaactaagaccagagattatgggcagctaggtagacctctcccatatgtaagaagcaaaacagaaaataattcacttcagttttcatctaaaaaccacaaaatcttgcaatttctgggccgtgaaatctctttgttctacggctttaagctacctcttcctcgtcgagtccttgactctttttgatcgccatgagaaatgtgtgattgggttatgcgttattgttgaataatgtctgggctcaatatttcagttcaaatgtatggatatgaacttatcactagaacaagttagttcttcgactatttgttcatttgtgctcttagaaccatcctcgcctaccctttcaggagggattcatgttgctccttacccaataactacgcctgaatctatatttatcttctttgcttcctgtgatcaaagaaaaatgcagaggattgtcacatactaccatccctaaaggttggagagatgaaaaagatataaactagctgtgtgtcaacggcttcacaaacctcataaaatctacaatacaccctgtcagtatcatggtcggttttgacgaagaaatgctggactcttggggtccagcagtttggggagtcatcttcgaccgattgcaaagcggaaatgtcaaaggtggtacgcttcaggttgcctggccaagcaacgtcgacaggaaaacagcagcccagcaaatccaatgggccaccaagttgcctctcgcccacctccctcaaaaggcactcgatataatatttgacaaaatggttggtttctcagtgggggttcgatatatggaagaaaagaagatccacgctatgcatggactcctaaaacacaacggaccactcaaagcgagtgtggaaaaatggttcagacggccggggaccgtcgaaaaatggaggggtttgatccggtcttacaagagttacgaagatgcaatgggacacttgtcggattgcactacgttcccaagagaaaccgataatcatccattcaagacccaccctgcatacaatgccgcaatgcaatgctcttcctgcttggagttcctggttcatttcgggatcgtcacgcccaatggctatgacttatcaggaagaagctggatcgaggcaggattgaatagtcctaatatggatctgctcacctaccttgtcagcaatgcagatcctcagcatctgatcaaacccagagatatcagagaaacccacgaaaaccacatccttctctcactcgtcggtgtcggcgcattttctcaattcgtgattgccctgaacaggctacgccaggcaaaactcgtgccggtcgacgaactccgcaaaatcttccacgaagcagcgatgcatgagttctgcgctgtcgcccccgtcgccgtggcagaagcactctaccaacacggaatcaacatcggcaacgtcgagcaccagtaccacgaactcggcggacagctagaatcctcctggcacatcgccgcagccttcaaccccgccggagctgagttcatggcctggctcgaaaaattctccatgctcaacgccgaggtccgaaactcagaaaacatgaacccgttaatgtacgccgcgtgcttcgacgagccagcctcaatcgattggctctgccagaaatgcgatcccatgcagcccagattaaccggaggcgcgcaggggtacgccttgatctgcgcagctcgaagctcacacctccacagcggcgagatattctctatcatcatctcccacctacccgataagctattcaccaatgaatacggcaaaatcttcggcacagagatcgccgaaggactagcatcacacaagcgcaagctcgccgacggccgagtccgcgaccccacgcagaacgtgatggagctgctcgccgtgcgcaagatgcaagcgctcgtccgccgtctgtctaatcactggactgggagtcaatggcatttggctctggatgcattcatacgcgataatgatctggggatcctcaggcacagtatcggtacaggcacgcgtctgcttcggagcagctcgcgggatggctcgcgcaaccgccgtaatgtacgctatcccaagagccctcagctaagcagtatttcggaacatgaggtgttgccgagggagaatggtaatgggtcggatcctgctctcgcggatgctattaggaggaataggcctagtcgtgttactgctcgcagtggcggcagacagactcttggtcctatcagggattctagcaatatggtcactaagaatgtgggtaggatgggatcgaatcgccgaatttgagatgttgtgtagcggcctggcgctgaagcatcgaaacacgcttctgcgtgtgatgttatttttcatttcgttgctttatgttgagtttttacattgttgttgatgttctgattcgaattcctatcgtactgtcaaaacccagtatagataccgttatttttcacgttacagcatgatcatgtgaccttttgtgcgtttttgattactaagtttgtccgtcatccatggattttcggaccgattgtttttagtttcttctcacattatcgaatcagatcattgtctattgcgtaacctctcttattcaaattaatatgatgatatatccctctagatgtcagtccaatcattagataaacaggttgaccaaaacaaaggatgagattcggacaatctaccagtcaagtgcacttgaagcaccgctctgcgatccaccgctaacacaatctagctctttgcaaactgttgccaattagtaaacagtgaggtaactggaaataaaatactcacgttggtctgccttttggaatagagtgcttccttctggcttgtgcatggctgggaggatccgacccccttcgatccgttcgagctttgtgtgctcctggagtcgacataagatttgacgtgtgtctgattaattgagttagacaatagaaaggaagttcatatccaagatccatacctgtgttatttaactcgcccgaagacctagttaaaataagaattagcgacaggtcttgttggataatagcttgaagtacccacccttgcttagtagagatagattgatattcaacctcaatctctctaatcaaattcttcgtcacactctgtgatacttcggatattttctgaatttcaggtttattgacagcgcagtgggcgaagaggtcgtagcgaatattcgtcttcgactcagaggcgggaaagaaggaaagggcaagacataaacccgcatcctgaaatgaataaataagtgtaatcgggaataaggaacacttttccagactactcttccccgtcatagccctgaaaagcttcatggcgggagatggcctcgatacttcagacattctctgatgtagctcgctggtataggtatcgaggtgacgagatcgagctattaaagtgtcagctattttctctaataattctgacatcagttgcttacttccagccttccaattgaagtctcccgacaaagtcagaccagaaacccaagtagatttccctctaagaccagccaatccactcaaagccgaagccacaccgtcaaatacagccggctcaccagaattgagattcacaaagatcaacccttgatcagtggtatgagtatgaacctcaaatagactattctgcgacttatcaaacccaggaacatcatcaaactgaggagccttcaccagccgaccagtggtatcatagctccagccgtgataacgacaaccaagaacagtcgaggcaccagtttctttcctggtaatagtatacgcacgatggcgacacacattatgaaacgcgcggatcttgtcgtccttaccgcgaatgagaaacaccgggaacccggcgatctcgaaagattgatatgagccaggcttataaaactgggagatatgggcaatatagagccatgtctagaatgcgcattagcgaagctgttcagtgatgttgttttggaatttctattacttggctgaagagcgcacgccgttcgagctcgaagacttcccgaccgctccaccatccttctgggatttcgggttctttggaaacggtcaaatctgagttatctagcggggtgattgcaatagatttggtgactttatcggcttttggttgagataaatggggccatgttcggtggagtagaaagataagtgtcacgacggccacgaggatggaggttagagatgttaggtagtctgtatcggtggaatccatgataaataaaggattgctgttctgaatgttagaaagtggttggcatgccctgatatactgtcactgggaggtttacatgttacccctccacacattacactctccacagttagcgcagatgcctccattacccgattggattggaatttcctggctgtatcactcagatgacttgtcatttgatcccgtatggttgggattattgttatcatacggtgagtactgtgcaaggcattaagatatagttgcattcacattcatatctcatatctcatcaaaatagcgatcattatattcctgcgatactacgctgccatttgaaccatggagggcgcgacatgctcctccagtcctgactctttcgctgccttggcagtcctgtcaaactcatgctgctcgcagaccatatcaaacacccgtctctggtagtctaagggaaatatgtgtgttagcattattgcatgaactaattttaaaagccacaactccaactcacaagacacgccattctccttgtttgggttcagaattccctcgtgataaacccccctagccagattgctctgggccttctcgcagagctcgaagtcttccatagccacttggcgcacgaatttgaagtattcttcgaacttgtctccagattcaagatggaagtagtcaaattccatccgggtgacctgcgggtcagcggtcgggcatactctgaagcaggacatgccaccaccatagacattcagcgtgcagttgggaaagaagtacaggaatagaccgtcatctgacttatttgggtctgcgatatgctgcgagaaattgtgcttgttgcgcacggtgtagaaggtcggcggatagtatttggagaaagacgggtgagtgtattggcagtgtagacactcttgatatccgtcgaccctgacgaaagttaataataacacagtagaaaagggtaaggtagaatattacatggtcttccagttaaaccggccttcatagttgatgctccgacggtgcggtagtttagtgaagtcgactttaccgagcagctcctcgagctctgggaagaattcatggaaactaggagcatcgtcggagatagttgagaagaggagtccagtgggggtgagatgactgcgcagttctttaccctgtagatagcagtgtttagaagggacttcacatttcatctggatcacacgtacggttttcgcgcagacaaccttcagctcctcatccacggggttcagagtctcccctgaagtgcgaacagcggagacagaccgctgcgcaatctcgtatgaaacatgctcgcccacaacctggaatctggtgactgggccgagcaagtaccaggactggagcatatcttagtcttcttcaactgccagaactgagaagactatgttacatactttgagaaagacagcccgccgctccatctgatataacggctggctgcagtaccaggaggcaggcaaagtgcgaacaagctcggacatgataccgataaaattagccagtggattcaaatttcagataaagacgattggagtggattgcgacagtgacagcgaaagagacggatttttatatcgctatagattattttctttcaatagttttatcgatctggattgagagaaatgctttttttgttggcaataaggttgtccaaccttgagtgctggacagatgcggtatatcgtttcccaaacgagttatcgagtcccgtcgatgtcacgcttgatcacatggcacacgcagatctgagatgttctagccgtgtaaggccctaaagatagacataatcttttcagggtcctgggacttttgtgagctgagtcaaaggatctacgacggcatataccatacccaagtaggcatttttagcctgtatgtgctcaagctagattttcaagatgaatgatattgagagaattagtaaactgaaacgttttacaaaaatgcccgatagcaaaagttgctccaagcatttgtggtcctatgtacttgacttcctcctttggtttcctagaccttgcagctttttgctcactgagcacgctctcagctttcaaattaggggtttctcttggctagttaaggggaaatataagacataatgggggattaaggaaataattttgtgttccaaacccctcggttttggatctaggaatctgctatctaataatcaacgcgccccgcacagcccggaaagtaacgatctctggcagactgatatagttcatatagttcggaccctctaaagtatttgattcggcaacattattccacacgctctggtcgtgttcatccacctagataatcttgatcataccagtagtaatcgcctcatgcataaataattcataaatcggcaaagtcagcagaattatgcgcataattagtgtgtttgccttgtttgtacttcatttagaccagctcaggtcattttcgctttatgttgtacgcacaatttctttgcgtatatttaaagaaagagagaaaccacaaagctgcttaatacagatcttttgtttgagatatatatgcaaatacaatattggtgccaacctaatatcccctgcgcggctcggatatgatcctgcccgttgaataccgccattgtagcatatcgctaattttactctgtcctgaagagctaaccaatgagagtacaatttctagacagtttctcctagcagacctaacgaggtactctatttcaaggggatgacgagtaacattgatggattttacgaaaaccatactggcatataaaggaaaagaaatacggcacatgtgcgtatagaatgcatggaaaacatgtttccgcagcctttgttgaatatcgagaaaaccaaaatgctatagtgatatttcacgcagcatggcatgaccaagcgcccctttgattgacgggcgacgtagagaattcctgataggtttttgtcctttggcgccctgtctagcaagcgaatcatacgtagcctgcccgtatggtactgccgtatcatgttgcttatcaggataggctgtagattcagctataatattgagttgatcatagtgtttcatcatacattgcgccaatcgataatcaataccggtagagtatcaagcgaccgctgctgggctggtatgactactatttcaccatttgagctaacatatagtcggtagccaataccagccccattgagaaaccgtaagaaactctccagagcggcttgatctaggtcacatggtaccatgatcgttgtagcggctacaaagccaatcaacagaaggagcaaaaggacgcaaaattggcgcatgttgaaaaaaaggtatgattggaaaatgtaaggtttcttgtatgatatgcttgggattaggtagaagtctcggggaggatttacagaagataatcgccttgctatttactagacctgcatgaaaacattctgtcgaccaggaaggcccactttctatatcgtcgttttgcttccttgttttgtgtactcagtcatttaccaccttgccgtgattatagagcatatagtagtaggatataatgaataactacttggaatgtgctcatgtaaacaggtactacatatagaaatgattgcttcgctgcactcttcactcgacgttgaaatttccgtagtctgaagtcctggctatctgaccctttgccaagaggatccccttctccagatgctgttaaactgaaatggcgattttgcccgaaaacccacgattgtcctcacattattggtcgttcatcgacgctaccgaccttgttagcactagtcggtgtagtggattgggggcatttgatcgctgcctaatatcgtggaatcttgagaaagccttcggaagaaccctatacccgcaagcctatgtgatatactaagtaggtcttggtcgtaaggccatttatattgtaggctgggttttctttgcgttgcaatcgagtcggtattcacctgaacggttcttcttgcaatttgactactggctggagaaaccacatcttacgagtcatgaggagacatcagatcgattggaagatgataaattgctgaccgctcattctggaccaccgtcctgaagtattttgcgggatattctaggtcagcaaaacacagcagccccgatgcactccacgcgagtcagactttcgaatgatctcacgtcattgtctttccgatagctgaaaacccctctctgtttgttgagagcttaacgctatgcggaacataccgaagtagttatataagtgacccctcccccgatactttgatcccaacagatcatatgagagccattttttctgatcatacattttttttgctattcaacatgcgccagtttctcggcggccttttgctccttctgttggttggctttgtggccacttcacatgcagtgcctagtagtgcaggtgtcacaatcatcatgggaccaagagacctaaatcaagccgctatagagagcttcttacgtgcctcgatgggacttgtttgactaccgaatatatgttaccccaggtggtgaatagtagtcataccagcctagcagcggtcgcttgatactaccggtattggttatcaattggcgcaatgtatgatgaaacacaaatgaaacattgggtcgtcatcaatcaaagaggagcttgatcatgccacatgtcacgttgcattactatggtcatctcgaaaaggctgcggaagtcatgatttagatgcatactatacgcgggcgtgttatagtcatccttcttcatatgccggtgtacgctatgaaaactccagcaacaataaatagctgcacatgtttatatgtctttttgtctccatcaagctttagagagcttgatggtagttagatcatcaccggcatttcttattacatctgttgatcattttctctgtcactcagatatctgcgagcaacttggaccacatactacacatataccctatacttttctcacaagaaattagagaaccaataggatgagaagtaactatacgaatggaggccaatgtacataaagaaggcatgatcggccaatcacgatacgtattagccatcacgtgatccattagacagaggaaatatggtgagagctacatagagttaagaagtacactataaccacccaaaaagaccaggaatgaaatacaattggaacggaaactgcaagatatagagagagactgatatttatttattctatttccctctgttgaggttcaaaatgaattcagctgcctagaggatccgagagtggccaccgaaggcgaaagagcaaaatagaagaagagagagattaattcagcttcctcaattccagaaatcaaacatttcaccaaaacgccaacgatccaaagagccagaagaaagagaagagtgaaagaagcatcacctaactaactataagagagatcagacgatccgtatctcttatcgggcaattacgtcgtcaacttccgccgacttgaaaggttggaactcaacaccttcagagccctgaaccttccatgatggccccgatcaaatatactcctcctcctaccccctcacctccagcgtcttgctacgccatgagtgacgacgaagaagatgaatacaacaccatcgcccaggctgcctcgaatagaggggtcaagctgctcttctccaaaagcaaagtatgacaatttccaacaaggaggaataccaatctaacaataatccaggtctatattcatccaacttcctctgccaaagacaatatccctggctttatcgccctcatccagcaaaaacctctccccgcatcacatgcatccgcgactcatttcaaaaaccccgatacaccctcctatctcctcgcatgggtcccagagtcctcccttggagaagcttatgatacatacgtgaaagtagacctctcggaaggtgactcttcgccgcgccagaagtacttggttccgccgcttccgaccaccaccacctacaaagaccccatcggactgtattcttttgcagttccgctatcacagatatactcgcttttagtacgaccaccgagcattggatggtggtttggaagtttagtgatcaacacccgagcgggcgatggcttccccgcgctatttttccatgacgacgaatgcgagtccaccatcttacaaaagaggaagagggtcaaggaaaccttcgatccatttggcaaggaagggggtttgttttggggcggcgatgaggtactgcgctggttacggaagtatgcggaggtgcagcgctcctcggtagacaggaacgtctacctcgttaacccgtcggatgaggaccagctgtctttcggccagctggtgacccatggcgacaaatccatcccagggcagacacagcccgaagccggggcttccgccggatcccgagccgaacagcctgatgccagcatggatccattcatgaagaccctcaaggagacacggtggaaagtgctggagcagctcagcaaaatcacgacctttacccgtcggactgccaatgatatagtcgataaccctctcataccgcctcagatgcgccgtcttttgaaaaacccagagatccagacgttgcaagatgagttcgacagcgccagggtctatctggctcgttgggcgatgagtgttgccgagcagagcgacaaagaccgaaaccagcgtatatggaccgcgcaggatatgctggaaatggagaatagctcggttggcgactttgagatcttagagctggagaccgggaacctggctatccaggagcgacgccgtgttctccaactggaagaatgggagggcttcttcgacccgagctcgggtagactccaagtcacagtggaggaaattaaagagcggatcttccatggcggcttggatcccaatgatggcgtcagaaaggaggcatggctcttccttctcggtgtttattcgtgggatagcagccacgaggagcgtcaagcaatgatgaactccaagcgcgatgagtacatccggctgaaagcaggctggtgggagcgaatggtcgagggcaactcaacggccgagcagtttgatcattggaaagagcaaaagactcggataggtgagattatacactgaattcgacatggtggctactaacacatggctatagaaaaggatgttcaccgcaccgaccgtaccattcctttatttgcaggcgaagatattcctcatccggatcctgattctccgttcgccgaaacaggtaccaacgtgcacctggagcagatgaaggatatgctcttgacctataacgaatttaacccagaccttgggtacgttcaagggatgagtgatctcctagcgccgatatatgctgtgatgcaagatgacgccgtagctttctgggcgtttgtcgggttcatggatcgaatggtatgtttccacgctgcaaatcgccgcattctcttactaacatctctgcaggagcataacttcctccgagaccaatctggaatgcgtggccagctattagctctcgatcacctcgtccagctcatggacccgcagctctacttacatctgcagtctgccgatagtaccaacttcttctttttcttccgtatgctcctggtgtggtacaaacgggagtttgactggagcgatgtcctgcgtctatgggagacattgtggaccgactatctctccagcagtttccacctgttcattgcgctcgccatactcgagaagcaccgagatgtaatcatggaccatctcaagcactttgatgaggtgctgaagtacagtacgttggcattggcatctgaatgtaaattgatttcaaattactaatttcgtatctccagtcaacgaactctccaacacaatggatctcgtacccattctcacccgcgcagagtcgctcttccaccgtttcgagcgttccgtgcaagccatcgacaagagaggcaacttccccactgcgcccaccgctcaccaacgtcgtccagggacaagcgaccaagattcatcttcgagcaacaagggaaagtcaccccagctcgctgtcgggtcaagcagcggagtcaacaccggcccctctactcttcaaaaggcaatcgattcccagaagccgaaggtggtttctccagagctacgcgaattacttcgcaaggacattccctggaaacgccaacaaacttcatgattggcatcgtgttgaagttgggattggatgtctcgcttgatatgatgttacactcttgaccaagtcatgctttcagttctcgaagtcttggctattgacgatttacgattgcctcatgtatatttttcttcgattttctttactgtcggttttgcggagcaggatatggctcacggacttttatcttgaaatgagcaccccgcatttgaattctccaattacgctgatagagatatctacaataggcagactccacgtagaactacatctagtaaggtaatagactcgtctaataaggaccgcggcataccaaagaatacattgttgtcaatatagaagtgtttaaagctggtcaaacggtgctggattgcgcgagggagatagcttcacgagatattatcgtcagtactgcaaataaagtggcatatagggtagatggtagactcacacgaaaagacaaggctgctcatatagacgtcaacagccgccagcaatgattctggcgcgcatatgcctatattcatcgttcatgtaacgacgtacctcccgatgccgctcgagaacatctatagctcagtgctgatcactcagtttataagccagcgcgatatcgagggagcgattcacgtacgcagtattacgagcgtcgtcagcatctagccccaaccacaggatctgtcggggactgatgactgagaaggaaatgataagatgagagaaaagaaaagaagaaatgcaggaggagaaggactatgaaaggcagaaaatcaacgataaataagaaaaagaaagtttacttggcccgaagtgaccagcgacgaccagggtctaattccttacaacccatctgcggtaagaccaaacctccagtgaagttcgctcctgtcctagggccgtcgcgtcgtagccagccggatgtattgcatccgcctgtgaagatataccagtctttccatactgggagtgttgggagaccgttctgcgagatcgtaattgttggtctgtgtggtactcttgtcttacggatctctcctttaaagtcgaagtcccaagcgaggttttcggtgcggtaactatgtcgtgattcgtgaatgcaaagcgaggcaatggctgcgtcgccggtcaggcgtacgtgacgtggtcgccacacgatctcgatctcgccagtggttgggtcgattacgtcttcttcgtgctctggcagtgtcgtcgccgcttcgctggcttttctgggtttcgcagtcgttccatcgccggcccagtcaagggggatcgggtacattcgtagacgtggtaacacagtagataaagagaaatcgacatgtcacatgattgcgtctcagagcaggatgaagattcatgtggcagaataaattgctggttgatgtaagactgggatttggatcgcagttggcacctcttcagaatagtgattcgagtaagcggcgacttctactgcgagccctttcttgctctcgcacattgtcaattcactccagtctgtctcggtatggattggcgcgatcagcactcgagctatgttcagggaagtatctcggtgattgatagatggactcttgatgaggagcacgggggggggggggggggggtgnnnnnnnnnnnnnnnnnnnnnnnnnnnnnnnnnnnnnnnnnnnnnnnnnnnnnnnnnnnnnnnnnnnnnnnnnnnnnnnnnnnnnnnnnnnnnnnnnnnnnnnnnnnnnnnnnnnnnnnnnnnnnnnnnnnnnnnnnnnnnnnnnnnnnnnnnnnnnnnnnnnnnnnnnnnnnnnnnnnnnnnnnnnnnnnnnnnnnnnnnnnnnnntaggagtgagtgcggggggggggggggggggggggggggggggggggggaggatgtagagtgtaagaatgagggaattcgagaatgatacttattttacaattagcagtatgaagatcatctgactggggattacgtcttttggattctaattcattcttctgtcaatcatcagcagttattagtcaggcctttctttgcactctttgcctcatatcagagatgttggaggctcatgagagtagtttacttaattaattatacattgaattctttattttcccaaaggcactccgtcttagtgaacaagacgtgaatggcaacctagagatatctatcaggcttccaaatgaggaaaccctattagtgttgacagaaattgttggtttagcgcgattatcaaagagctcgatgtctaagttttgctgtccatttcgatatagaataattttcttatatcaaatgtctatcattgacctacttagcctaagccagaatccacgtgacatgctctaacacatgttatacaaagagttggacccatttgctttatattaaggcctttccttctctctcttcttcttcctcttctcccctcactctctcccccctacatcccccaccccctatatttataaataatctctgactgctatatttgacactcaatttgctgcgacatgtagaacagggtttcaccaacctcctgcctatactgagtcccctttataccggccatcgtccttaccgtgcgaactcatattagatgttaccatattggccttatagctaacttaatacagcagacttcggatttcctaacgctccactgcactcgcgagcctcgcaagcatgcagaagtcgtctaagaatttgatatttttatatccattgtttttggattgattttcggtctaagaagaaaccgaagaatgaaaacagccattcaaggtcaactgcattcgaaatgccgccgcctcggctctgccagcgctttttcagggagcgagtcaaataagaactggtgagctttccttaggtcttcgcttttattctaccccttatgcatctacatcgttgcatatcctttcatttgtcttcaactccgctaaccaccgctgcaattacagtcttcagcctctcgagctagagaattgtgactcatagaatgatttccgtcgagcagcgaggtgaagaacccgaaaacgccatccaacaaagtgtcagtgaaccggggtgttacaaaatgaggtcccaaatggatacatcattgctcggttcgagaagtctgccacgcggcttggcaaacgaggattgaagacggtgtcagattgtgagccttcgagtcgatgcgattatgcacagaaagaaagctcggtttaccattgcgaaaagtaaactaccctcgctttccctgcaaccaaaaacaaaggccaccatcagcatggccgcccaaagccaatagccgccgccggcaagcacctgactccagacaaagtgaatgatgaatgccggacaggaacccgttcaggaggtggtactgaccttacccggtgaggaggacgaagccgaaaatgagccatggaggagttgattagcggaaaccgaaaggaatggagttgttctttgagaggggttggagggggtcagatctctcaaatacgcctgagcatatatatcggcattcgctttcacggattgagagagagaggaaattcaacaagactccaggaacaggcaatgactgtcaatggattgaaaacaccactcgcaaagatcacgtcctgacgctggactgcttgctataaagtgcatcgaatttatctttacatacagcgaactgattaggtgttgggtgggcggnnnnnnnnnnnnnnnnnnnnnnnnnnnnnnnnnnnnnnnnnnnnnnnnnnnnnnnnnnnnnnnnnnnnnnnnnnnnnnnnnnnnnnnnnnnnnnnnnnnnnnnnnnnnnnnnnnnnnnnnnnnnnnnnnnnnnnnnnnnnnnnnnnnnnnnnnnnnnnnnnnnnnnnnnnnnnnnnnnnnnnnnnnnnnnnnnnnnnnnnnnnnnnnnnnnnnnnnnnnnnnnnnnnnnnnnnnnnnnnnnnnnnnnnnnnnnnnnnnnnnnnnnnnnnnnnnnnnnnnnnnnnnnnnnnnnnnnnnnnnnnnnnnnnnnnnnnnnnnnnnnnnnnnnnnnnnnnnnnnnnnnnnnnnnnnnnnnnnnnnnnnnnnnnnnnnnnnnnnnnnnnnnnnnnnnnnnnnnnnnnnnnnnnnnnnnnnnnnnnnnnnnnnnnnnnnnnnnnnnnnnnnnnnnnnnnnnnnnnnnnnnnnnnnnnnnnnnnnnnnnnnnnnnnnnnnnnnnnnnnnnnnnnnnnnnnnnnnnnnnnnnnnnnnnnnnnnnnnnnnnnnnnnnnnnnnnnnnnnnnnnnnnnnnnnnnnnnnnnnnnnnnnnnnnnnnnnnnnnnnnnnnnnnnnnnnnnnnnnnnnnnnnnnnnnnnnnnnnnnnnnnnnnnnnnnnnnnnnnnnnnnnnnnnnnnnnnnnnnnnnnnnnnnnnnnnnnnnnnnnnnnnnnnnnnnnnnnnnnnnnnnnnnnnnnnnnnnnnnnnnnnnnnnnnnnnnnnnnnnnnnnnnnnnnnnnnnnnnnnnnnnnnnnnnnnnnnnnnnnnnnnnnnnnnnnnnnnnnnnnnnnnnnnnnnnnnnnnnnnnnnnnnnnnnnnnnnnnnnnnnnnnnnnnnnnnnnnnnnnnnnnnnnnnnnnnnnnnnnnnnnnnnnnnnnnnnnnnnnnnnnnnnnnnnnnnnnnnnnnnnnnnnnnnnnnnnnnnnnnnnnnnnnnnnnnnnnnnnnnnnnnnnnnnnnnnnnnnnnnnnnnnnnnnnnnnnnnnnnnnnnnnnnnnnnnnnnnnnnnnnnnnnnnnnnnnnnnnnnnnnnnnnnnnnnnnnnnnnnnnnnnnnnnnnnnnnnnnnnnngcgggagggcggtgggcagcggaggggggggggggggggggggggggggggggggggagttcatgggaggaatgtttactagatgttaacaccccgagcgcgctaagcgtctcggctctctgtctcctcgacagcttcttctgggcatttggggggatctaggcacgcagaaacagcctgcgccctaggcaagtgtgcaacaagaagcatatggatcgtactgttatcttaatccaacaatcaatacttctggcgcttcgagcgctcattcgcagtccttgtactttttggtgtcttcgtcgtgggcacctttttcgctttggtatctcttgtcgttgtctcagaactatagctcatggaagtcgagatatcgcgcattgatcttggaagatctttaattactgaaatacgtagcgtagcgtcttgaatatgaagaaaatgtgatatgtatccaactattaaatgctaagataactctatcaaccagataactgtagggtattgttgaaccacaccaaatcccaaaccaaacacaaaaccaagtgagaaacagattcgccacgctgatgcaagtagaagagaagatataacccgagataacggacggcgtcaaaatgtactgccaaatgtccatatgtccaagagcgcagggccaggacgtgaagaaaaataactgtagacccatccatgacgggtgaagcgggggaataagaagagagaaaaaatatgggaatcaaaagaagagaatttatatgcgaaggatcattctgtcgaagttcacggcctgcgagaccccagacccttcagcacgacccgcctgcttgtgcccattgagccgatatcgccaatgctgcggactttgggtaaggagtgttcaatcacgctgccatcgccaatttcaaatcggtcatcagcatcgtggtcaggcggcatgctcagtgcaaaatggggtgggttctgggagctggagcggcgggtcttttggagaacatctgcaacccaggcttcaccctctgggctcatggattcgtaccgagcacgcggtctgggtccagctaatcccagcggggtggagcgggattcgttggccgtggagacagtagcggttgcgctaggagaatgggcgtccccgactgaatagccagaagacatcgacagacgtctaccggccgaggaagggagaggggagacagcgggctgaggcgaggtaaaggaggagatgtggcctgtcgacactgccctagtgttcatcacatcggatgcggttgagcctcgtcgtttcttgtgaactgtaagggatgaaggtggccgagcgctgagcacggaggatggtcgagagggggtagcccggccagaagcaagatatgaggtagccggggttagcttagtacccggagaagcgtggggtggtgaggaacgtgtctttataccctgcacctccacacgaggcgtttcagacaccttacgacgaccgtgatgaatgacatattcacgaaggtattcgcccaggtcggcccatccaccgccaacacgaaccatcactcgctgcccctcttcgccaacggtgcgaacgaacagttttgtcggtgcggactggcccccatggtggaggtggtagagtttgacacagctgtcctccgtcttgtaggcatgagagtgccgtcttcgggcagcgggcattaatgtcagagaaggtgcgggcgtcgtgctgcgagttggaccagtgggagattcggatctgtaccgcattcgtcggtccacggatgagaccgatgaggatgcgtctacttcgtggttggaatcgaccaaatggattttacccggcagcgagttgagaatcgagttgatcttttcgtcgagctggtctcgcggttgtttgctgtgcttggttggcgaggaagggcggaatccgaaatcggtgagttcggattcatgctcttctacatatgacagctcttgtctcttcacacccagactttcgagactcggatgggtagtcagtcgttgacgccatcggagagacttgggctgaagaagatgttccatggcccttcgagcggaattcatcccgaacgtctttctgtttcgttccgcaatttttgccatttcattttgagtgttcaagtcacttgcagacttccctcgtgacaatttatgctgagtcgggagacgtggaactggtggaatggacgaagcagaagtatcttggaatgtgattctggttcgtgtctaagatagtcaattagaatgagcatattatcaaatggacaatgggccacatacctttggggattttgcgaagtcggccgatgtaacagagtgtgttctagtcctagacgatttcacactagccacacctggcgccgactcgcttcccatgcccaactccaagcgttcattgatgaaccgctcgaggggtagactgaccgtgcgattttgttggaaggagattcgcgggtcaagcttctggttttccaaacgacgcagacgatcctctctcaaggtatgatccccatgcgaaggaggatgcgtagattcagggcgagacgatggcccaaggggtgtcacattagaggaagtaatgtgctgcccatgtgtctcgggactggatatgagagaagaatggtctgaaagcaaagaacccacagatccagtagatgaccgacgacgacgcgtgattttatgcgccactttactatctttgtcgagatcatgcttcccttggcgggatttggaaagtctaatggggctctgcaatggcttgggaacattccgttgacaagattctgctttcccttcattccgcgggtggtgagactcgatcgagcctgacttgggtgatgccaccgccatgggtatttgggaaaccctgctaggcggtctcgatttcggcactcggattactgacctgtttggtgtgagaaccggggagatagttgctgctaccggagtatcacactggttctgttcacggggccggtttggagatttagggtcctggccagcaggagaaccgatggttttaggcttaggattgagttccgctgctttgtgttgtggagaaagttgtttttcctcctcgtcggaggtctgttcttcttcaccagccacagtatcacgaggcaagtctttgcgaccagcgggggcattcgcctcttccgcggcggcaaccccaacagagaagacgaccttggaaatttggacttccatttcaggtacagtggaatgttgaacgaatgaatcgtcagtatgctcggacaatggacttggtcttgtcgatacctgactgggaggtgacatagctccatcgagctgttggaagccgggcggaggaatgttttccttgttttccaagctgcgatcaattgcacaaggcgtagatgcaggagttaagaagggctgtcgattgatcgcaggagttggtggaaagtcggactgtgttggtgtttctaaatcctcatgcttctcttccattggagacttggatagagatattgagagtttgagctttggcgacacattcccttcgactgcaggaagtggcgtctcgttaagaggcaccgtgttgttttcaacagattgcgagctagttggttttgcgtcactggatgagtgtccaataccacactggatttcaggctcatgcttgacggcctgctcctgggggaaacgacgatcatcggaaggttccgatacaactgtatcggaagtttggtcctgttgtgtttccttcaacgactctgtgcgttgtaggtcggctgcgcgcctctcagccatttcagactcggcttttgaccggagccacgcattgtgaaccttgtaattatcggcctcgacaacccacgcagcaaaatcagactcaatggcttccaaatcatcaatccattgttcgggcaaagaatccggacgaccttccaacgcgtcgagaactcggtccatccgcctccccacagccacaactgcggactcaagtttaacatggtcaacagctagagaagcatcggataattcggtagggtcggggaaaaaagaatgtggggctctgatggcgtggagggaggagtcaagggcggagcgggtcaagctgagctccctcagcagcccaggaatttggcgtaagacaaaaatgcgaatgtcccaagtggctagtaaagcgttcagtcgcgacaggtatggaagagcgcgcaaaatggttgctgtgatgacagctgtaaagtcactcagttgtacatagctgagcggcggaggcacggacacacagcttgtggcggacgagggccgagacctggagggaatgtgggcattcaaaacgtgttcctttaattcttccacgttaagatcttccattccatcgcggatttcgtccgccctcctctcgtatcgctcgacgacgctggctgacaagcttccgtagtagctttcctgggtgttgctagggggagccaaaaagccccaagggatagaattttccccagagcacgactcagacggaggaataaaacccatcccgacctttgcgtcgcgttgatttggccaatcccatgattggacctctttatgccacaagttcaggttttgggcagctaccgccgcgcgtatccctagggcgcgttccgaaggcgacacctgggagatacttcgtgaaagaatatcatgagcaccttgttcattcgaagggactgcgtcgatggatgtgagggcttggagagttgattcgggagaaaggttactgaggagagggtcgagttgctgatagacggagccggggattctctccagtgaggaggttgagcgcgagttgtttcgggagtgggagggagagaggcgaatgaaagggcggttcggatttattcgagtggccgccatgccgaatagatgctcagcctaaatctgagatgtaaagtcacagggagcctcgactggctcgaggatggcatgtaagtgacggacgtcggaacgagggcgggaaagaagactgtcgagcccgcatgctgagacgcgcgtcttaagaaagtgcagaacttggctagcagctcgaaattggaaaggaaataaagaaatgaggaaaaatgataaaaacgattggaagttgagggggaggtcgaggtacaaaggtgagaggatgcgagaagcgagggacagcggagagtggaggggtgctgaagtgggcacaaatgagcgacaagaagagaaagaccggctttctgatcacaatgatatccaaacaataatcggaagattttctgaagttgaatttattattgaagtggagattagatcaggggaagggccctaaggtcctagtggagttgccgacacgaaccatcgccgggtgatccgccctttactatggggatatactacagttcttcagttcattttcttatttacgatataacttggactattgaagcatatcggcggatcggaggcttgtggaatcggtgaggaaagcagcgatataaagaaatattactggaaggggaaaacaaggctatttgaaaatagcttcaactatagacgcaaggagtaagaatattaatatttacccaattatttcctatgacctccatagcaaggccttgatatagcaaaatcaaaacaaattacctattcgatcgatctctatcactatgcggtaatgatggcgttgtcggaactgatggcgcacctcctagcctagggccgaggaatatccccgagaactcttcagagttgcagagttgcagcaaaagtatcttctaacaagccagtctatcatcatgcaagggtttcgctaccgcccagaacttgtgaaagatcttccggaagagttcactaaagagctcaaggaatatgaagattggttcatgctcgatgcgcccaagttgaagatgatcacagatcattttgcccaggagctggagaaaggtctgagcgttgagggtgggtctattgtcagtatcagttggccttgaatatcaagtagatgctaactgaaacgttgacctgaagcctatgaatatcacgtggatcatgagatacccaacgggtcaggagaagggacgcattctcaccgttgatctgggaggaaccaatattcgtatatgcgatgtctgtttttccacggggaagagagacttcgagcaacgtcagcggaaatacaagcttccggatgaagtcaaaaaaaccacgaaagaagccttatggggtttcattgcggagcgaatccaactttttctcgacgaaagtcgctgtgaaattgagagtgctagcagtgctagcagtgctagtagtgctagtagtgctagtagtgctcccagtgctcacagtgctgcccgtgctgccagtgcttcaagcccactaccgatggcgttcacattctcatttccagtggagcaaaagtctatccgcagtggtattttgcagcgctggaccaaagacttcgatattcccggagtggtagggcacgatgtagtaccgcagctggaagaagaacttgcaaagagggtaagctcacgttggataccaagaaagtcggagctgatcaaagtagaatgtcccagtgaaagtggtcgccctcgtcaacgacacagtggggacccttatcgcgtcatcttaccgggatccgcagataaaaatgggcagcacttttagtactggctgcaatgcagcgtacatggaagaatgccgtttgatccccaagcttcatgattcaggactacccgaagatgcaactgtaatcatcaacaccgagtacggctcctttgataacgagcgcaaggtgctacccttaactccatttgaccgacagatcgacgatgagtctgcccatccaggcaggcagatctatgagaagatggtggctgggttgtacatcggagagatgctgcgcctggtaatgctgaaaatgcacgacaaaggtatactcttcaagggccaaaatgtctcacgtcttcagactgcgaactcattggagacatcgtttctgtctactgtcgagaaggacatgtcggaaagtctgaccgatatgaaagaggagttcagaaagtgcctcaatctagaactctcattggatgagctgaaagcgtgccgttggcttgtcggcctggtcgcgatgcgttcagcgcgtctatacgcgtgcgggattgcggccatatgcaagaagaaaggaatccgtcagtgccacgttggcgttgatggtgcggtgttcaataaatatagtatgttggagggacgggcaagccagggtcttcgtgatattttcgactgggagccagacagattggacctgatttctctgaacccggccgaggatgggtctggaataggagcagcgctggttgcgagtttggctgttgacccgggtgaactagaagagtgtggcacagaggaatatttgtaaaagtgaatgccatcaagctgttccaaagtgagagagaagagttgtagtgaaatcataggacgatagcgataagcacgtaagtgaggtgtcgaacctccctccattccccaactcgcaaaatgcgattccgaacacaaataagagacagcaggaccttctccagtaagaccaattgttgaaatagaagatcagagctaactcaatcagagctcaccgcgtcgctgtcctcgctaggcaaggtatgttggatgcgcctggagcacgaagtcatccgcttcaccatcatacctgaccaaggcacacaagtgtgggcgtcaataccggtcgtatgcataatgatatcaatttatcagtcatatgatctatatattgaccatctcccaggaaaccattttcgatgactcgacctacgagctacagtccaattccgacgccatcaacatcgaagtcaacatcagcgtcctaaatcgagccctgcgctccgcctggggctcaacacatacacagctccgcctaactaaaaaggacaaaattcccctcttggcactaacagtcctcgcatcagaatggacagagggaaacatggccttggccaccaataatgacacagatggctttggcgacgacccaaatccagacgcagctccagccgatacgacgggcgatcggggaccacgcgagcgccagacatggattacgcaagaaatcccgatcaagatcctcaacgaggcagcagtcgaaggcctgcacgagccgcactgtccagaccccgaagtgcacattatcctacccaatctagcgcagttgaagagtatctccgatcgcttcacgaaactcgcatctacagatagcaaaggtcgaaagccgggtgtgatggcgcccgatgcaccggggatgcactctgtttctttcggcgggccgggcgctagcacagctgcgacggcactgtccaccaactcatctcccaagcttgaattatctgctaatatgcatggctcgctacggttggctattgctacggacgagctgcgcatcgcgagtgtctggtctgatctcgtgaacccgccgttggaccctgcgcagatgagccaggagcagatcagccagcttcccagtgagcttaatcggaggcgggaggcgagtgagggatctgagtctggttgggctaaggtgcggattgatggaaaggattggagtcgggtgcttagtattgggaggcttagtcccaaggttgtcgcctgtgggttttctgataggttgccactcgctggtgcaagtgctgactcgatttctcgtttgttatgtttaggcttcgtcaatgagatggcactagttttatacgtttatctgccaggtaatggacagggggaagaatcttgtttaacggtgagttgacattactccaaggatgcattacccaacaaccaagcgttctaacagtcgtcagtattatattaattccttcaccacatgatactgtccgtggtgaaacttgggctacaatgtcatcttcgcaaggttcaggcgttcgaaagtcggaatgaattattagaaatcgttattaagacacatgcatgtcagaaaccatgcaataagaaacccccaggtcccaaaagttccagcaagcaacaaaatgtcaggccagaatagaacagcaaggggaggaggatgatatacataatgccaggagtacgagcccttgactccatggatgaggtggcaccagggaacagcaacgagcaagctatgtgcaaaagcaaggcttccgataacgttcagtgagcgagaatgcagagagatgtcgtgtctgccgaggcaaaaaaacaggacacatgcaggttgatggggcaatgacaaatctagtaacaggggaaggttatattattcaagggtaggggatgttgttcatcaaagtaatcatgtgataacaaataaaaggcataacaatgaaacgaacataatgagacaaaagaaaaggacattatagcactcagctagtcgagagactagtaaagtactatatcatcagcctttctctctgaatggctgatgattatttagccatcacgtcaacgtagcgtcccttcttcttgccgcgaactgcgctgcccttgcgcgcctgaggcgcaccgatcaaatcgtcaattgagctagcatgagtcaaggacgaagaaggccgtggcggcgggccactggaactaccgggcggtgttggcatggccgctcccgtagaaacggaccgaggcgcgagaccagggaagcctgggctgggggacaagaaaggcggtgcggcggtagaggaagattgaggccggccaccagagaccgacattgggggcatcgggggcatcgggggcgcaccgttttggggcatactatttgagctcgcagtccgactggggggagcggatcttcgaggagggggcggggtggcatgcacaggcgcgctactaccggggtctttcttgttgacccatttcttcagttccttgtcgtagtaaaaggagctctcttcgccaagtttagctctgataggaccgccaccggagttttcttctttcttagctccgccgaaccaaccaccaaaccagcccttcttgccagattgttggggaccctttttagctgcaacacaagtcagattagcaagtgagataagcaataggcgtttctaatacataccatcttcctcggcggcttttgcgaacgcttcgttggccttgcgatcattctccgctttttggatagccgctgcccgggcagcaagatcgtcgtcgtcgtcatccatgatcgactgcttccttggctgctccgcggcccgtggcaggtcctcctcctgggaaccatagcccatgtctacaccagccgcagctggctcgtaagaatttggctcataagagaccggctcataagatgagctggcagcgggaggtgcgtagggtgactctgagtctggtacactggctggcataccaggagggccttgataatatggggattggctggatgtggcagcctggccaggaggatggtaaaagagaccattcaccatagactgtgcagccggatgagcttcagccggtgacgtagcttcttctaccggagcaagaggaatataagaggattgaggtggtgttggttgatacccacccgcgcttggcgacccataccctggagctccataggacatctgttgatcaatcgagggcgagagttcctgtgagcttcggcgttgtccatagggtgggaagtaggaagcagatctctgagaatctattgacgatcggcccttgaactgctcaggtgaggcaccaggcgcatattggctcgatgggtgatacttggacgcgccgctggtaggaataagcggcgctccagccgcggctccaggataagagccgtatatttcagatacagaaggtgagcggctaattgttggggtgccggccacgtttgcaaaaggaccaaactccgcatgctcgccacccttgccggatccagtcgatgcagcatcgctatcatcgcctaccacgaagctattgaaacgagcccacatagaccccgagaccttttccatgcttggtctcgagatccaagagccactgtcgctggttgtttggcgcagacgagcagacaactcttcaacttccgcaaagaggtgttggtgatagtagggcgagggacgagtggttgctttcaatgccgctgccactgcgtcgcaatagccttgcgcctctaaattgcgaccctggtctacgaggcacctggcattcagtatcttaaatgccaacagatgtggcagatgagctgtgggagagttgccgagaacagacatagcaaactcataggcctcggtcagcaagatagcatcttcatccatcaaggaagaatggcaacgctgatggtcagcaccaaggagagtgatgttggcctgtggatcatccgggccaccgaaaacggcagcgcgcgagaagatgtaacaaacgtgagctgcctccgtccgtccataagaactaagcagatgtccaagagaaaaaagggcttggtggtccccaggacttcggttactcaaaaccagtcccaaggtatccctccatttgtctaaaccctcgagggcatttttggtagacccctggccattggccatgctaataagttgcagacctgcccgggcagacggggcaacgagttcgtcgatgctttcttcgatattgccagcgaaaatctcgtagagggctgcaagtgactcggtgtttgcggatttcgatcggacctcgcggcggacaaactcctgcgcgacctgtttcgatattgacctgtccatggtggatgagatgatcatcgcatgtccccaaagacgtcgatcgacagcgctccacacggccttctctcgatcgccacatattaagtgtagtcgaagctcttccaaccactgtgcatcaacagcatcagcctgcaaaggcgtttccgaaggggcaacccctcccgagggggctaagctgcttgcgtatgatccgtctgcgtcggagttgggtaggttggggaagatgatatgtcggagagaggtttgaatttcaggggaactctccagattaccgtcattctctaccagaagcttcacaactttccagagaagggttttctcctcctggcgtttgtgcgtatcagactgaacctgttcgtagcttggaaggtctgaattttcgaatgctgcaatcttgctagaaagccaagcaaccaaatccttcttctttgactttgccttgagaggcccagggtgctggacaatggtatcagcggagggcagccactcgctcagctgggagattttcggttcaccaagagtgggttgaatcattggcgccacttgtccaatggaatagcgagggacgtgcttgggaaaacaagataccatggatccaccgaacccgaatttgaagatcggagcacctttccatcgttccaagggatcatgctcctgcccatcattgggagcgataaattccagatgatgcgtcggagcacgggtttgatgaacaggcttcacaggagcatacggattcacggtttgaattggcaagcttgaaacttgcaccgaagccggccgttggaggggatcgatgtcttgtccgtaggatcgcgggctcgtcaagtcccgggcaggtgactgagtctgagatctgcgaagtggacccatttggaaatcgctaggtggtggagacaatccattggccgggggagcaggaggagcaggaggagcgtgttctggacccggcgcaagacgctgagcgaattcattgagatattcctgaggggcatagcgactttgaggcggagatggctggagaggtgagcccgcactttctctccgcggtaggttggcaggaccgttgaaatattgcggagcactaggtgggatttgtccgaaaccagctccttgctcgcgcggcgaagaaaggttgatcgcaggctcaagcgatgggggcctgtgtgattgatcaggctggtaagaaaccttttcatggtgtgcaagaggacttgaagtccgtggctggaaaggcaaattttggccaggaacgttaagcggctgtgaggcataacgattgcgaacagaagaggtaggagggggcgcaggcgaatatctcggcaacgaaggtggctttgggggtgcttgaaaaccaggaggttgaggagagtaccttgcaacggtaggaggtccgaccggggcactcgatgacaggctagcatatggatccagctgttcaggtggctgaagtgtggattggattgggagcccgataggttgtggggctggtggtacaacagaagcatattgaacctggggaggaggaagagacgatccggtcatcgtcggcgccgtctgcggattaggggtgtaccgacctgagctggcaggcctagatcttggtggcggcagagggagttcctcatagaaattcttcggcgcaggaggagcggccagggctgaggggggagctgccggaggggggaagccagctacagcaggaatcggtatgccagaggcacatggaagaggaggcggtggcatactaattactggtggaggaacaggtttgtgggtaacgaccggctttcggggtcgggagatatcatctggaaggtcgtaaggagatttataaccctcttttgaccgctcagcaaagctctctcccctgattgccacggggttctgcggctgttgcgagaagtatgatgacatcgctcccgtggttggcggcgcagttcctgggagaggaatattctgcaaaagatcaccagtggacggttggtggggtgtgtatatattaggaacaggtcttggctgagaaaagacttgtggggtctggaacggactgttcaagccaaccaccaaaccgtcgttgacaggctgaacaggggtttgatgagcgtgctcctgttcagagacagactgggcagcttcagtctccagcagtatgtcgtcatcgtccaatgccgcctcccaacgagccgccagatcatcgtccagtgagtcaccgagttcagcttcccaccgtgccgctagctcctcctccgatggatcggccattgtttggggctccaacgacgcagccttcagggcatcatcaaactgcgctgcggccgaagtgtcactaaccggggaatcgagagcaaacccggctgattccaagacctgagatgtgctctttcgtgcgatatgaacaacgggttgctcctcgggctctttctttggggtggaggcgaagaaatcctcatcggcgttcttagcctctgtctttggagccgagatgaagaagtcatctacatcgtcttcatcgttggcaaacacactgtctattgatgtctcctgttccgttgggtgttgaggcgaagccggtgtagactcatctaacaacggaaccccttcctcaaacctggattcagcttctggcggggcaaagataggctttgtctggctgttcagttggtcaaaaaagccgtcctcatcggactccacttcaccgcttgactcgtttgcccagaaaggttgatcctgtgtggttgtatccacgcccgctgcggccggatctagatgggcgtcgttggtcggcgcaaaggcctccgcgataggagatggtgatccggtattcccagattcaacatttatcgagtgagacacgagatcaatttgctcattttcggtcggggcgatggcattttcagttgagttgaagacatcaagactctccgcatcacgtgtggcacctgtgaatgctgtttcctctggcaatggacgtacagcttcttcaacaaaatttggctcgtcgctatcctggatttgagtagaggttgaggcgagctctgagatattatgaggggtggcctcttcggtggagggcagcgtattgctcaggtccttctcgaaggtggcccagggattttcagaatcggcattgtctgcgtccgttcccgggaacagttcgtcggtgggagtggactgagaggtatatttatttttagaagtgtccaatgtaggctcggatgccgttgtttcctctcttggaggtgtagtctctcccacaaacgtcgactccggcgctgtttcttgttcaggtgcgacagtgggcacaacagtatctgagttttcggtatgaacagaaggaaacccgtttatgatggtgggaaagctattactggtctccgcgccatggactgaaggtgcttcaatctgaactggttgcgcgggttgagtttttggcagtgtctggcttaggacggtatctgcattttcaatagatggcgtagttgtatgagtcgctgcgatcgtctcatcggggacatgactgctcttatcgacggaatcggtgtctaggcacatatcctggtccaccactggtgattcattgttcactagcacgtctaagctcgtgtattgaggctgaatcccatctacctcatcggatatatcccacgcagagaaatcctcactctgtggcgatacaacatcgtctagtgacctgtcctttggcccgtccgccgcaatcgggtccgacaacccactctggatcgtaacaggggaattattgttatcgggccgtgatgccggattccatgactccgaatcattctcggtcgcttggtgcgccatatgtgcaaagttattatcgattgccaacgtgactgtagatggggggcgcagtccgcagggaccaacctgacacgtctccaatgacgcctcaggagatcaacaatcgtaaggaaaacgggggtcgagggcgtcaacttaagaatccattaaacaatgtagatataacccagagcaaaaaactcaaagaaagaaatcgaccatgaacacatcagctgatggcgaagggaaaaaccaagcagtcggattgtctgcgacagcgaacgtcgatctccgcctatgattcccccgggggccaaatgaatgcgctgagtcatcaggatgctgtcccgaataggaaaaatacaaacccgtgactcggagtaagggatagtccggctctcttatgctcacataaccttaaaagtgaagtattacgtcagctcgttatcgccgcgaattatgcacccatgtgattgcgtggccccgacaaggcagtcctcgaccggtcttcaaaaggattcggtggttcttcggtttatatatctcacaattttttatggtagtggcattggctgcattctacacaaagaaacggttcattgtgaccctagcagcatccctccactctttcatcatcatgctgcatatgcgttttgaccaataccaccgcacatgataacatatacttgagatgaaccttcctttgatgcaaggcccaaaattaccaccttggatgcaaccagcaatccatttgacttgaatcataccagcttcccgagaatgccttcctcatccgactaccaacaccccctagaccatcccgatgcgccggacgccttctcggactcggacgatgacttggatctagaagagctagaccccagcacgacatccccccaacagtcccgggattctcgggactatactggccgcaaaagaagctacgggccgggtattgcgctgcgcaacttacgtgtcggagcggcaagtcggtggagacgcagtgcgtccggacgtggagacatggaggatgataccgatgcgcttttagagaacggggagacacaaggcttgggggactcacatgcaagctctcggaacttggaggatgatgacgcgcctctactagatcgcagaagctcgactcgcgatttggacgatgagcctgccaagcaaggcagccgcttgcgcttcccaatattcaaaattcctgcattcctacagggcacatcaattcgatttggattaaatgatattccctctgagaaccaacctccccgtgaagtacttgtcggacaataccaggcggctaagtatccggctaatgtggtctcgaatgcaaaatacacaccctggagcttcctaccgagaaccctttacaacgaattctccttttttttcaacatctacttcctccttgtcgctttatcgcaggtcatcccggtactgcgaattggttatatgtcgtcttacattgcccctttggcctttgtggtttcaatatcattgggtaaagaggcacttgatgacattggtcgtcggcgacgagatgccgaagccaatgcggaagaatattgcactgtggcattaggaaggtccaacgagatggaggtcacaaaaaagtcgcgagatctgaaagttggtgatgtgctcaaagtccgcaagaaccaacgccttcctgccgatgtggtaattctgaagagcatttcaaatgattcaggcactcctcgtcattcattaacagaagaacctatccctgggacgtcttccgacttgctcgaaccaggtcagggatcgtccgaacccacaatcaacaccacattgaagaatggtgaagatgttggagattcaccctcagctgatactttcatccgaactgatcaattggatggtgaaactgactggaagcttcgtctgccttccatgctgtctcaatcgcttcctctgggtgatttagctcgactacaaatcacggctagcgctcctgataaaagagtcaacgaattcttggggactattagcttgggaccgcccactgggctctacgatgctcacgttgacaaatcatctgggcctccaaccaatgaaggaacgcctgcgcctgtggaaaatcaatcagctcccttgacaatcgacaataccgcctgggccaacactgttcttgcgtccaataccaccacttacgccgtcatcatctatacgggatctcaaacccgagcttcgctttcgacttccgcttcccgttcgaagacaggcctgttagagctcgaaattaacaacctcaccaaaattctttgcgccctcacattcactctctcaatcatccttgtcgggttggaaagattccaaccaacaaacgacaagaaatggtacgttgctatcatgatctatcttattctcttctccacaatcattcccatgagccttcgggtcaatctggacatggccaagtcggtatacgggcggttcatcgaacgggacaaggacattccaggaactgtagtccgcaccagtacaattccagaagacctgggaaggatcgaataccttctttcggataagacgggaacgttgacccaaaatgagatggagctcaaaaaaatacacgttggcactgtctcatacgccaacgaggcaatggacgaagtcgcctcgtttattcgtcaggcttttgcgttttcgggcaatgccttgattaccccttcaactgtctttggtactcaggccggacatgccacagcgccgcggacaagaagagagattggttcccgcgtccgggatatcatattagcacttgctctctgtcacaacgttacgccgaccacagaggaggaagacggccggaaggtgacgagctatcaagcgtcatcgcctgatgaaatcgccattattcgatataccgaagaagttggattaaagctagcatatcgagacagacaaagtatcgtcttggaatccaccgactccaagcaggttgtggtccgcgctcggattctcgacatcttcccattcacatccgactccaagcgaatggggattatcgtccaattccagcacgatgaagacatacttgaatccagcaaagatgatagtgaaatttggttctatcagaaaggtgcagacactgtcatgacaactattgttgcagcaaatgactggcttgacgaggagactacgaacatggctcgggaagggttgcgaactctcgttgttgggcgcaaaagaatctccgcacagcaataccaagatttctctgctaaatacaaacaagcgtcactgtctttccaagggcgagatgcaggcatggcgaaggttgtgagcgaataccttgaacaagatttggagctttccggtgtgaccggtgtggaagatcggctgcaacgcgacgtcaaatcctctctcgagctgttacgcaacgccggtgttaagatctggatgctgacgggtgacaaggtggaaacagctcgttgtgtcgctatttctgccaaattggtctctcggggccagtacattcacacagtcaccaaagtcacagacaagtcgactgcccaagaggctcttgacttcttgcgcaacaagactgactgctgcctgctcattgatggcgagtccttgaacctcatgcttggtcaatttaaaacagctttcatctctgtcgcggtgctacttcccgctgtgatcgcgtgccgatgctcccctacccagaaagctgagattgcagacctgattcgccaacacacaaagaaacgtgtctgttgtatcggagatggcggtaacgatgtctcgatgattcaagcagccgatgtcggaattggtatcgtgggcaaggaaggccgccaagcatctctggctgctgattttagtatcacgcagttccaccatattaccaagcttctcgtctggcacggccgcaactcgtacaagcggtctgctaaactagcgcagttcatcatgcaccgtgggttgatcatcagtgtttgccagactatgtacagcattgccagccacttcgatcccaagggcttgttcatcaattggctgatggtcggctacgccactgtttataccaacgcaccggtcttctccctcgcctttgatcgggatgtcgacgagcgtcttgccaatctctacccagagctttataaagagctcaagacagggaagagtctaagctaccgctcgttctttggctgggttctcatttccgtctaccagggtgcagtgatccagggtctctctcagatattgttggataccatcacagggccgcgccttattagtctttccttcacggccctcgtcctcaatgagcttggcatggtcgccacttcaatcacaacatggcacccggtcatgatcttttgtctgattggtacgctgcttgtatatgcaggcagtatccccttcctgggcgagtacttcgaccttagttacgtgattacccttgactggttgtggcgagttttcgccgtgctggctgtgtctctggttccggtctgggctggcaaaatgatcaaacagtcgtggcacccgccaagctaccgaaaagttcgtggatagagttgctttgtcatgattttggtgtatcatagcattctctcgcttggattttgttatatctctcttctttcataccctagctaccaccggtctagtatcatgtggctctctgtatattaatcttgagcgttttcttgttgagcgcatcggcattgggctaggtacttccatactagattattcaatcatttcagtttcattattggaattctgaccacctagacagagtacaagttcacatagtgtctatattatctccatcaactcttccggaggatatatattattctcattcatgctatgtatcttcgtcatgaacttgaataattgtagcagtcactccagcaattaaaaaagggcatttgaaaccatatatacaacaagatcgcagatggatgttgtacttacatatagtactccgtagttggattgcccttagcaggcggatccccagggccctccaatgacgttacgcagaatcgataagcaaacacgtgaccaccccagtcaggaaggcggtcaatccatatcgaatcttttttttttcttcggggtcaaacatctgctgcatagattctaggatcaaccacttttcggttgctaattcctcgcccgtcatgtctgacgaaattgtctggcaggttatcaaccagcaattctgctcctacaaactcaagtgagtattaatcggagctgctggctatttagtccgcagagccttttatctccgttatatatggatcgaaaaaacaagaacctcccattaaccattccaaccttctctccagaactacgaaagaccaaaacttctgtcgcaatgaatacaacgtcagcggtctgtgcaatcgccagtcctgcccactggccaattcgcggtatgcgacggtgcgaagcgatcccgaaacgggcgtcatgtacctgtacatgaagactgtcgaacgagcccacatgcccagcaaatggtgggagcgtgtgcgcttatcttccaactacgccaaggccctcgagcaagtcgacgagcgcctcatctactggcccaagttcttgacccacaagtgcaagcagcgtctcacccgcctgacgcaggtcagcatccgcatgaagaacatcgccaaggaggatgagcgtctcggagaaaaggttgtgcccaagctggcgccaaaggtccgccgtcgtgaggcgactcgcgagcgtaaggccgagtctgccgctaaggtcgagagagccattgagcgtgagcttattgagcgtctgcgcagcggcgcttacggtgatcggccactcaatgttgaggagggcatctggaagaaggttctccgtggtcttgagcgggctggtgacggtgagcgtgatatggatatggatgacggcgaggagattgaggaggaggaggaagagggtgttggtgaggtcgagtacgtcagcgatctcgatgaggatgaggacctcgaggatatggaggactggctgggagttgactcagccgattccagcgattacgatgacgatgagagtgacgatgatgacagcgaggacgacgaggaggctagcgcagatgagaagaagcccaagcccagtgccaagcggaagcatgttgctccccaggcgaagcctcgcaagaagggtcctcgcatcgagatcgaatacgagaccgagggtgctggcaaggaccagatcatggcatgatttcatcgatgttggaggatttgggaaaagtttacctgatcttgcatggtgtttgggctgtcaattcttttgttttatattcttattctgtgcttagtgatcgggcatcatacccttgctatactgcatccactgcaactcacgatcctagatcttcgaatgtctattttattttcaattctaccgctatcttcaacataatttattgagccaagacctggctgttgctttatttaggtgaaacacgtgatcatgtgggccaatgaatgccctccactatcgtcgcctttcattctcctttaaacaacttcacctcaccaggagccggttcttctgttaatatctcccttagtaatcattccaatcatcataccttgttcaactctttggctctgaatatcttgcattcggtccccacaagtaaagctccagctccgcgccaaccccaccccgtatcgaagctgccattctgcagacggcgcattactcaaccaaaccactcggctgctgcaatatgagctcgtacctctcatccttgaccacgtcttcggccatctctggcctgggttcgcggctcaccaaccttcgccgtgccattactctaggcgacgagggagacgaccccgacaacgaagactgctcccacatctccaacgcccttcgagcctactacactgaaaagggccgtccattcccaccatggctcccacaagatcccaagggcccagctccggcaccctcgcgcgcgattgcgacttcacagctaccctccggcggctacaaccaagggtcccccgccaaccccaactccggccggagcggtggtctaggtgacctatggggtgattctcccacatcacaagcatcaatcccacagacagctagtcttcgtcgcggacgtggtgcaccgccgctctcctcggccaacagcgcgccgccgggtccggccatcacactttcccagtacgattcgcctggatcgggtccatctggagcgcggccattgcctagccaacgagccgggtcgcatcagcctgttcagaatcgtccgaatctcgaccgtgctgggtcgggtggtggttcagcccaggagcgactgcgggccagattacagggaggaaggtctcctagtcccaatattgacccgagtattcggaagccagttggagcgtctgggaaacggtgagagtgctgaggcttacattgcatagtggagagcatggcgtcgaggagttattttccaatgtttaccgaatgtttaccgagtacatatctcaagaacaaatctcattcaacgatagtcatatggttccaacggagtagatctttaccggatacattcgtatgttttgagaattcgcgctagtttgactttcccccacgcttcgggggcatattaggctgagttcttcagacgggcagagatcaccccaccgtcatccaacgagctaagatatgcaatcaacccagaattgcttagcagcagccaccaatatcaagccacagccaatgaatggctatctcggcctgcgatggggaaaatcccgcattttaccccgacgtcgtcatcccgtgtttggagggccgtgttgctccagcaagggaacataacgcaattcggaaggtagtttcctttctctcttcaaaaagttgatgggcccaagcctagatatcaactcgactaaagaaatcatgagataccccagtttccccgaaatgtcgccgacggcagtcctctccacggggaccccaggccagttgaataccgagtcatgcaacatagagtcttttcagtccctggattatctccgaggtgtggcttttgtcatatgaaattccttttcgtttgtcgctaggtaataccttcggcttctagtgtcggaattgtcttcttccgcaggactccctccgtccaattatacgtctataccgtgatatatgccaacaaaacgggaagccgggaagaatccagaagtgccagaccacgtttgaaagtgtgtctgaggactaattccgagtattggctgttgtgtggcctggaatggtcgacataagctttgatggcaaacgattcgtccacaatcccgatggcttgattccctgtcactccaatccctgctgtacacctatagtacactgcgtattccaggtttagtcctgtttttaccttccggtgagaccgcattttcgttcttccccttctcctcaacctccccggactggtcctggatctccacttctctcacatgggtaagtaccgagtgtatactccaggccgagcctataggacttggccaatttctacaacataacgcgtccctgagcggttttttgactttgcttttttgccgaacccccacacggagcctttgtcgtgcgtcataccaaccgtcgctatagcccatctgcacggcctcaaatagtcctttctcctcttccaatggctagtgtcattgcttgttccatacttctctccattccctattagtcctggtccctgctccggtagagcctggagtgacagttccactccactattatacatatcctttagtagacccccaactcatatcctgaggtctcgttcatcatggccgacctcaaagatgtcgaggcacctcagaacacgcacagcgaagacaaggacgccgtcgcctttgagatggacgatgtggcggaccaaaagctccaaaacgggctgagcgaagccgccatggatgcggaactgcagcagctggaagagcaggtgcacattatccccaaatcccgcctcgatataaccatgtccaatcctgctgcctttacctacgtcctcgtcgccttcgcgtccatgggaggtatgctatctggtcttgaccagtcgcttatcagtggcgcaaacctctacctccccgttgatctaggtctgtctgcagcagataacagtctagtcaacgcgggcatgccactcggagccgttaccggtgctcttctcctttctccagcaaacgagtacctcggtcgtcgtatggctatcattgtctcctgtattctgtacacaatcggtgccgccctggaggctggcgctataaacttcggaatggtgttcgcaggccgattcattcttggcgctggtgtcggtttggagggtggtactgtcccagtctatgtcgcagagtgtggtatgttttccatcactccccatcctatctgtatacccagttctaaccccactctttaatagttccccgcagactccgcggtaacctcgtatccttgtaccaactaaacatcgccctgggtgaagtcctcggctacgccgtcgctgcaatgttcgttagcgtcgaaggaaactggcgttacatcctaggctcctcgctggtcttctcaacaatccttttcgtgggtatgctcttcctgccagagagtccccgattcctaatgcacaagggacgcgaggtcgaagcgtacgcagtatggaagaagatccgtggattcaacgacctcgaagccaaagacgagttcctcggaatgcgacaagccgtcacagccgaaagcgaggaacaagcccagtcgaagaactacccctggatggacttctttactgtacctcgcgcacgccgcgccatggtctacgccaatatcatgatcttcctaggacagttcacaggcgtcaacgcagtgatgtactacatgtcgacgctgatgcaggccatcggcttcggcgacaaggacgccgtcttcatgtctcttgtcggcggtggggcattgctgatcggcaccatcccggccgtgctatacatggagcgatttggtcgtcggtactgggcgaatgtgatgctgccgggtttcttcattggtcttctgctcgtcggtgttggctacactatcgatgctgataagtaccccgccgcggcacagggcatttacttcacaggtattgtgctgtacatgggtttcttcggctcgtacgcttgtttgacgtgggtcgtgccttccgaggtcttccctacatatctgcgctcgtatggaatgacgacggccgacgctaatttgttcctgtgctcgtttatcgttacgtacaacttcacgcgcatgatggagtctatgcagcggattggtctgacgcttggtttctacggtggtattgccatcctcggctgggcttatcagattatcttcatgccggagactaagaacaaaacccttgaggagatcgaggagattttctcgctccctactgctgttattgttaagcggaacttgaagcagacggcgcaggttattcgggacttgtcgcgcttccgtcttaagaaagtgttttctcctgagccgtacaactaggctagtaatgcatatttgttggcaagattgaataatgagaaatggaattggtttttgttcatacaaagtttgccattgattgcatagttaatggttccattttctatcatggctgagtagatataggcaaagctgactatttgtatctctctcgacgtgctaccaggatactcgaggaaaggtgtcatggaatgccctcttgggtccaaggatgaggaagtttgtcgacactccgctgggtagaatcgtgagatatatacataaatgtccggaacgcggagcgactaaaattttccgcagcgccgatacatttacacagatacgattcctaggcaaaataccaaaattctcccaattgaatgccgattttgcgattggcaacaacgaatgaatgaatgacccatggcagctacgggtgggaagaaatgcaagagaaattaaaaaaatttaaatgagctctgagggtttgtggagctggtgggtatgtcattgtggtgtttgggagcacggacttcaggctttggtgtaacgagtattggttgaggagagaaagagaacatcggaaaggagttttgcatgtcaaagaccaaattgaaagtgagacatgatgatatggtggccgaggcatgttcttgtccacgatggcagttactatatacaatgtaattagattgcattgaaatgaaataaaatgaaccaatgattttacggtaccccatctggacacgcccgagaagtataaatcttattgcgatgttgtatattcaatcaagtcaaagggatccttcggtatagcgccttgcaactcccgatgcggtaagagtccggcccaactccatgccattttattaagatacccttttgaaagagcgcatcttttgggcaaaaacaactgcgtgaccataaatatttgctaacaattaaaacggggaaattatcaatttaatttgataaaaaaaaaacaatgggacgagccgggatcgaaccagcgaccttgcgaacttcagtcgcacgctctcccaactgagctatcgtcccatttaggatgatgatcgaggaatagttatgcatcatgaacagagtatagctccccaggtagcccgtttttgtctccgccttcttcactcatttctctagatcctaaccatagtcctacgtttgtatgactcctatcataatgaataattttccacatgtttctaggacttgtatatgtaagcaattatcagttcataactatagatcagcttaaaataacaagtacataattatgtactgtcgtctcacaacctgaaatatggtatccgtattctaccagtgcagtcagtgccaacttatattatctaattaagcctaaatttttatcccaagtggttatttctgcatgagctcgtgtaggaatattgctggtgttgaaagcaccaactgcatatatataacagtttctttcctacgtctttctatggttctcaggccttaatacatacattgcatcgcttagtagattgagttactacgttaatatcttccggtagtattcaaagatattaggatgcacctataataggcactcgtgtactgcgagatggttatccattgcattcgtagatgccgtttagaaccctaggaaagcgaccatcctgtattatttaatcatggtatcaacctggtgatcttcttctatcccgaatgggacgatagctcagttgggagagcgtgcgactgaagttcgcaaggtcgctggttcgatcccggctcgtcccattagtttttgcttgtttttgtcttctattgccttctctatgtcgatggatggcttacgtctcgaataacaaggtcgagcggagacgggtagacatgcttactttaagattttaccgcggctacctcctgcttaagtgctattttcgaatctagtgaacatctctattattcgcaaccactccagcctcgggatgatccctctagaacacatctaccccaagatggaaagtgagtataagtacaaatataacaagtataaacataagcgtacagtaggccaacaaaccgccaacaaaacatgagtatgtcgggtgtaacatcaatccctcaaggcttcaaagtccgcttggattgacgaacatataccgtcaactagtgacatttcctcctctactggcacacctaaggctccagcttgccaactcaccgtgcacaccaagcttgcccctttgacactgatgatgttgaaaacaagcggggcactagtaacatttccaggctgcgagaacaccatcttgacgaccttgcacttttggactgacccgtcactcgagttttcgaaggcaagtaaattgctcagctcgtacgaggagtcccgctgctgtccaagtttactcaatgtccaatttctgatgctgggaacgtatctcaataggccgattgcttgatcttgcagtctcgcaccgcacgcagcgaggtttttcgtcatcgagctcgcggctgcccacatctcctcggaaaaatgaggctccgttacattcggtgcccgtggatgtgcctcgtaataggcagaaacgaaaagaccccatgtgagaccaggcgtcccaatagacgctcgcatgtcaaccggcgtccccgagacaaaattggttacgccagggctaggaatggccctgcttagcgcccggacgatcatctggtgcatcgttgccgtgagcttggtgtcatgacttcttgaagtctgcagggccctttggaccagcggagccttaatctcgaggagtcttactctgctctggagagcggctgccggatcgaagaacatgggtgacccaatccaagtaccggcatctagagtgctggcagatgcgcggagcccaagaaaattggctataaacttcggcaagcaaactgcaatcaatggctcgaggagaaatttccaagatataggaagcctttcgggtgtgtcaaacggtgccggaagcgtttgacttggcagagtcactaagaaagagggtttctcctccatgccagtagtctggcgccatgcatcgagaaaggcacgatggaatgcaaccccgaccatgccgtccccgagagcatgggagaacgcaaaggcgataaagcatcgcgtcgctgtggggtcttgcggcgataccaaagggaggaccacgattcgccaaggtgggataccagcaggccatgggcggtcaaggatggctggtaagatcttttgaattgttgccgtatcgccattggtcctggcttcgtcttcgtgaattatagacaagtgatcgtgcagatcaatactagaaaccgcttcgtatgttggcttgtccgtctgcttcgccttgatgaccacgcttaggtatgggaatttctcgatgcagtgtctcaaaggtgcaataaatgactgagcggagtggacatctatattttcactcgcaatttcatagattgctcctatgacgagcgcgttgtagaagccgacatcttcgcgactaattgtacgacattcattgggacctgtgttccggttagcgctacggatatagctcaagaagtatatttcactaacttgcaagtctcatgaacgttgtggggagcgacattttcgtacaacgtggtaaacgtatctcccccgtaggctcaggctccagtgatgtgaatttataggatacgatttagcgtgcctatttgagtttagcgtggtcctgccattagcgttaccaggataggaacaagtagaagttcgtagagcgactacaaaactaatcggtatatcaaagcaaaagagtgcttccaaggttcaaatctattattcatgcagagtaacggatgaggcccggaagatgcataaataagttgctaaattaggcaatgagtgtcacccgcaattgtcacaatccttaagtaatggtgtttttatatatgaatcgaggtctttcgcaaactggagtggctaggacagcttggggtttcttgtaataactgtataaaatttcgttcgagctatagaatcatctaggcaacactatcattgtagacctaggacaaatgatctctgctagcaatcttgatccagaaatcatgatgcaccaacaaggctaaattctcctgtttccaaactggccttgttccgttgttgatcttgggtcggaacagacggaagaactaccagctagtcagcgagaatgaatagtgaccttcaagaaaaagaaacatacctgagccaagagcttatacgtctccaaaagtgcaatatttttgcctaaacagatgcgagtgccatatccccacgtgagaatacacttgtccatcaaggcagcccgatctggatcctccaaccagcgctcggggcggaattcatgagcatcctcgccaaagatccgccgattccgatggacaacgtatggattggcaccaatctccgttccagctgggataaattggttatgaagtgtcatgcctccttcagagacgtagcggggaatgatcatcggggtggagggctgatagcgcattgtctctttgtaacaggccgagaagtagggcatatctttgatctcatcgtagagcggaaccggatggctgagaagtcctcgccgatcataatcgtcaatctcggcgaccaacttctcatggacgcctggagtttggagcacgtatcgtagaaatccgcagaagaatgcggctgttgtatcagatgccgccaccattaacacaaaacattcggttttgacttcgtccagcgtaattgtagacccatcggggttctttgcgtttaggatattgtctaggaagtcaccctgctgtcgttgtttgggatttttcaatcgctcttcaaggagccgatcgcgaaactagtcaattattagcgttatactacctttgactgaatgccaaggtactgagaggtgtataaataccgccatgatctttcctgttcctgacccatctccgggcttgggcatgaaataccgtctcgtgatggggttctccaaaaatggccgagctagccatggcaaagccccaacaattgcagcaaaaggggccattttatggaagttttcaatcaagttctccacatcacggccttgagtgatgaatccaatcggttcaccaaaggaaagctggcagatcatgtcgtaggcaaaccatctgtccgaatcagcttcttgctcactattcatatctcatatggcggagtttactaactgcgaccaagcagcaaaatccatttcttgaccagtgtgggcaaacctctcagtcaacacgttcgtccattggaaaatgcgctcatcaacctgaccctcgagtgatttcaagttcgtcaacgtaaacgaagcagccactctcttgcgcttcatagcatgctcatcatgcttaagcgtctggaaaggcggcgcgatttctcctaaaaccccaactgtatacacatcagttttatctactcggcgatgataaatctggggcaaaaacataggatcatccacggccaatagattcggtgcggcccgcacgatagatccgtatttttcatgatactcaatgcctatcgtgtgcgcttgtttggtgtgtaggatccatagtttgaagaagtcggagatggaggcccagaaggggccagggaatccgcgtaggggatggaagtagcggttgtagatgccccggtagaggatgtaggttgcgagcgcaacgacgccgagaaggcataaatgcattttggttgattaaataaatgcgcaattcgtatagtttcgagaaatgctgggtgttttatcagtcattttctgacctaacttgcatatactacgtatgacaggctgatggtcagaaatcagaccgccgttcattggctgagtgagatcatttgaaacgtcaaggagactagaagatgatggttgaattaatctcgaggcgctgcttcaatgttcttagatctctgcgcctaatttcgattatgaatgccaacttttgtaatcgtcgaggctctcccccttaaattgagatacttgatggaaatgggatatcacaaagtaatgatcaattctaatgaaaatggatgaagaagaggaactgtccgaggagaaaccaagtaagtacctacacctggtgggggaaagccttgtacatgacaatcaatgtgttctgggtttaatataggaaatgacgtaaacagaagtgagaactgcattctttgctaagtcctgtgaatagtggatggcagaggtgacctcagtttgtattaattctagtcagagggtttttgtttgagaattgtgatactaaaaatactacatggcagatttaaaggctaaaaaagaccaatatgacaatgacaaggtttatgattgaggctttaggtaactctaatagcagaaaagacgaagacaaacaaattatagagtcagtttgctctccacagcatcggataggatctgcagcgacgaggtctgattcaaaacatccaagaaaggaatatcaaccttgaaaacggtgtagaaccacgaccggaactccgaggcaatcatactgtccattccgtaggaggtgattggcttgctcgagtcgatcttatccaatcccatgagcagcaggttcgagaagcgcttcctgacaagaagaagaattgcttcgttgagggtggacgcggatgcaatttcgctgttggttgagaccatggtcttgaggacaacggnnnnnnnnnnnnnnnnnnnnnnnnnnnnnnnnnnnnnnnnnnnnnnnnnnnnnnnnnnnnnnnnnnnnnnnnnnnnnnnnnnnnnnnnnnnnnnnnnnnnnnnnnnnnnnnnnnnnnnnnnnnnnnnnnnnnnnnnnnnnnnnnnnnnggccgagggtgtggggggggggggcggggatccccgcggcccaggggagggcagatacagaggtagcggaggatgacacagcagaatcctgagaagcaggtgaatcgagcgatgcagatagaagaacggctctgggatcttgcattgtgccgttgctgacgtcaaatccttgatcgagcagtttgcggatggcctgcggctccagtcccgtgaggatgtgcgaggcagaaagacggtcatactcgagacctggggccagtgactttggtccatcagccgaagtgtgggcgagtgcgaggtcgacgacctggatcagctcagcttcgttgagaggctggatacccttccggaggaggagcgcctcgatttccgggttttcatgaagataacccacctccgagatcattccgagaccgatggagacgatgggctttccgacgctgcgacggtatcttgcgaaagcgtcaaggaagccgttggcagagcagtagttggattcggtggctgtaccaacactgcccgagaccgaagaggtcaggaggaagaagtccagttcgctgtcaccgtgagcttctaaagcatggtgcaggttccaggttccttgccatttgggctggatacccgtatgccaagccttatgggtcatggtggaaaagagggcctcactgagacccattgcggcttgaatcacaccgccaatgggcttgatgcaagcggcgacggcggcatcggcatcggaggcattgacgatgtctccgcgaacaactttgacaacagcaccagaggcctcaaggttagacaccagctcacgggctgcaggcttgtcacagccagagcgaccgaggaaagtgaaatgacgagcgccgcgatcgaacatccagcggctgagactgcgacctagaccaccgagacaaccaatgaggaggtaagacttgtttgggtcaaaggtggtgagatggcgcgcatgggcaacttggatgagactggatgggttctccaacgagatcacgaccttaccaatacggcccttggtagagaagaagcggtatgcttgagcgatatcactaacatcgaaggtggaaatgggaactggcttgacagtgccagctcggtacagctccaaagcctcggcaaatttactagaagaatattagttggtgttgtaaaaaaagaatggagaggaaatattacgtgatccaaatgttgcggtagtgttcatcttcgtggtagaagagctccgtcagatcaaaggcagtgaaggtcacgttacgcaagaacatgcgcatatccaactgtccggcatcgataatgtcgcgcttgccaacctccacaaagcggccaaagttggcacaacattgccaagtggcatgcagcagatcgcctgtcagggaattgacgacgacatcaacaccccgaccgttggtggcggctagaataccggcaacaaacgaatcattccgggagttgaagatattctcacgaggaaccccaagttcgttgacaagataatctttcttttcatctgtgctgacggtggtatacacggtcgctccgcgttgaagagcgatcgcaatagtggcggttccaaaggcaccggcaccggaatgcacgagaatagtttcgccggagcgcaggtgagcacgatcatccagggcatatagagcagttccatagataacaggcagggtgggcatcacttcaaagctctcgtggggcagcatcttgagacaagcccaggccgggacccgctcgatggtgctgaagctatttggtgccaggacaacaacgcgatcaccagcaacgagattggagacatctgaagcaacgccacggacgattccactgaactcaatggcagccgtgcccttgcgggtttcgatcttgccagacagcgtgtagatgtctttggcgttgagactaacagccttgacttctatttcaacctgaccagatggaatctcggtggggggattggccagacgttggaaataaattgagtcagtaatgccaacacgcttgatggcaagctgagcaggggacgcttcggccagagtcatggtgtcgacctcgtcagttctgcgcttgctgaacagatcattgagtgtggtatcgggcaggaatcggctcacgtggaggagaccattgtgccagacaaactccttgtcatcggccgtgtcctcgaccgtgagtatgtgctcgactttcgtgcaaatggcatcgcgaccggtgccgctggggtgctttccaacgtccagaaccacaaagcgcagagctggttgttcgagcatcagggcacgcgagagaccgctagacagagagagatcaggagcatcaccagtcacagtggaggcgcccgtcagccaaatgagctctgcagcgttgtccgtgacgatcttgaaacgcatcatctcctctggtgtcatggttgggatgaagggggtctccatctccagtagggagatgacagtcgactgcgagatcatctcctcagtcacttcatcaaggcgtgcagaggagatgtcctccgcgacaaagaactggtggagagcattcgccatcttcgacggttgatcatgaagcaggaccacgcggcggttccatttgcgctgtggctgagaagaaagaacaagagtgattccaaagggtagattgaatacagtgcatccagactgaaccagaatgtcagacgggacactctctgttcgggcaacaatgatgccattcacatcgagcagactcagaaactggtccaccttcttcaacgacttggggtatgtgctatgaggaagcaaaataacgtcgtacttctcctcggtctcctcgatcttctcgctctcggcggtcttccattctcggatgcgagggaaatcggtcttctcatccaaaaactcccgccatccctgggtcttgcagtcgcatcccttgccgagctccaacacgcgcagtcgaggattcttgtgcgcagccagatccaacaaggcggaaacaacaccaaccttgccattgtccgccaaatcggggtggttgacaagaaaatcggtgatgacctcttgcagatgaggttgatcagcggttgtcagtcggctaaggtctggcttccagaccactcgcaagcatgggtgacggcctgtgtcggagtcttgttcagccttgccggtgtacagagacaggcgaacaccgcgcatgttgatcacagaagacccagagccatcttgcaatgaggcatcaatcgacttggttccaaacccggtgctctgagacagagaatggatagatccggatgaattaacactctctgtgctgggagtgttaatctcgcacaggtcgaggaagacgggtagatgggcgcgaagtcggttgaggttaccggccgtgccacccattatggcggcctgcaaacaggcatcgatggtcaatgggtgaacagtgtagtaatcgccttgatacgatgttcgggcgacacgttgcttgataaccgtttcagagacggcagctgggttgattctcttcttgtctgtcttcatcgacaccagagattggaatgtgggaccaaagacaagcccttcctcggccagcttggagtaccatgggcccattgaccattgctcatattgggcggtatcgactgtgatagccggcaaggactttcggtcgagtcttatgcagcctgtgcaatgtgagactgcggctccagcctgccacgatgagatagcaaagtcataccaagtgctggaggtggatgccttggaaatgcgagctggggagacggttgtgtataaatcagcctgttgatgttcatcggcgtgtacgatcaatgcggaggcgatgttgacgttgcgcaaaacaaatgatgagtcagcctcggcaaggttcttgatctgtgaaatggcctcaatcgccatggaaatgtatccagcagctgggaagacaacctggctctcaagcttatggtcattcagccagggcacctcgttcagtcgcacagtattcttccagactcggtcaacaccgttaccagcggccatttctgatcctagcaattcatgacgcgggtaggggcgactgcgaagatcactactcagtcgtgactctctccacagcagctggctgtagctccagtggtaagtaggaagatcgggaataaccttggccatggcagaagaagtatcgttgacggccatgatgttgatatcatgtccacggatgtaaagttctccagcgagggtctttaggcagatatcggcgtctttaccacggacaagggtagcgctgtatggcgcatcgtcgatagaatattgcaataatgttcgaatctgcttgacgggcaattgtagggctgaatggggtccaatctcaatgagatggcatttgcccttctccaggattctggtaacggctgccgaaaactgcacggagttctcgagattctggcgccaatagctgtgaggcaatactgctgttgtcttacggctgtaccagttgggcccgtctacacccacactcgaaaagaactggatgtctttgtcgatataattggcgggaagagttggccatgcctgctcaataaggcgttcatactcttcaccaatctccttcatcatataagagtgataagccttgccacctgtctgtagtttgcgggcgaattttcctgcctgggaggctgtctgcaagagggtttccacaccggagacgctaccagagattgtcacactctcaggggaattgacacatgcaacaaccacttccttttcgagagaaagctctgaaatcaactctttggcctcttctgcgctaccgccaagtgccatcatggatccttgagatttgagctggccgacaacatgtccccggtaataggcaatcatgatcgcctgggcttcactcaacaatccagcggcgtatgctgcagcaatttctccagaggaatgaccggccaccatttgaggagcgacgccccagctgttaagtaggttgacgagaccgatttgcactgcagtacacagaggctgagagaatctcgcatcgccgacgcgactggtagcagcgggctccattaaaacatccttgatcgaccatgcgggtgcctcaggcagcgtctgcagcacattatcgaggtggtcgatggtgtcccggtaaatcgggctctgctcgaacagttgacggcccatctccgcccattgagcaccctggccggtgaaaaggaaggcgatgtccaatgccggaagggttttagtgaccaatccctcgacgacgagatcagttgttgcagtggcctgactggcaaagatataaccacgctgggacagcttcgatcgacggtttgcgagtgtatgggcgaggtccacaaagtcatagtgggcgccgttgcggatgctatagctgagatcggtgatccgggcctccaaagcttcaacggtagaggcagacagagctagaaggtatttcttctctgcaggttggttatgtgtgattgccttgggaatcttgttgactgaggccaaatactgaatcggatcttccagaatctaccacggttagtatcgcagtattttggattggagagcaaatcactcactgcatgggcatttgcaccgccataaccaaacgagttaatgctgacacggcgcatggcagatggccagttggtaagtttggtcacgatttccatgttccaatccgccaatttgactgtctggttagcatcatgactctcattaaactcggatacaggactcacgcttggggttcaacttggtcacgccaactgtggcagggatagcctggtgctcgaaggtgaggattgccttgattacagcagtgattccactggctgcctcactgtgtccgacatttgttttgttctaggtttcattgttcagcagaccgcgcatttatggttgagttgaaatactcacagcaccaattagcaaaggagatcttcccttgcgcttgaagacccggctcagagcttcaacttccatggggtcaccgacggcagtaccagtaccgtgacattcgacgtagtcagtgtcttctacgaagagtccagccatgcggtaggccttgcggatgacttctgcctgtcctgaaatgctgggctgagtgataccggaggttttaccatttctagaacagttagtatgcttagacgcatctggatcgagaatacatacgcattgacggcgctgccacgaatcaccgcgcggattgggtcgccatctcgcagagcagcagacagccgcttgatatacaaagcgctgacaccctcagcacgaccgtagccatcggcactcgcatcgaaggtgtggcaagtcgaggttggggagagaacgcctcccttcatggttccgagatgctgctccgggcccatgatcaagttggcaccggccaccacagcgccttcgcattccccagccttgatggcgttgacggcgttgtggagacaataaattgatgatgaacaagctgtgtcgacagtgaaactattgatcttgtcagattgaaagaaaagtccattgatagctaatgaccacatacctaggaccgcgaaggtcaaagatgtagctcagacggttggagagaattgcagtaccggaaccagtggcactgtatcggtgcagcgactccggatctctggcctgcatggtctgaaagtccacggtgaaattaccgacatagacaccaatgtctgcgccggcaacctgcttgagggaaacaccagcactttcaaagcattcataaacaacctcgagcagcttgcgctgctgagggtccatgtatgtggcttcaagattgttgatcccaaagaaggagttttcaaattgacgtacatcctccttcaagaaatagccgcccttggtattcatcacaccggcacgatcgccttcggggtggaagaatccgtcggcattgaaacgttccttcggaatttcgcattgaccagttcgctcattgacgagcatctcccagaagtcattgggggaggagacgccaccgggaagtcggcaagctttatcggttagctctatggactcgagaagatggagtaatacttacccattccgacaatcacaatggggtcattggttggctcgggtccattggaaagagtagcctcgagagaagaaacgtcgatagaacccatttcgtcggtgtaaacgtagaatagaattgtggttgggaatggaattgtcaaattcttgaggattcggaataaacttgcacttttcaaactgtgtatatatatcccctgtactattctatataatctctaaatgtatacagcaaggatctgaccaagggtgcagtgacaaagtgacaaggctcacgatctcaccgtcagacgtcaggcttatacgcggtcagatcggtcagatcgacctatactttaaccctcccacagggcaattaagcatcggcaaaaccaaaatgaagtccgttttaattacagggtcagttttgttttgtttgttggatctcccaatattgacgaacgattcagttgtggaaagggaggcatcggcgaggccttggctcttcagtatcgcgctcgaggtacaactcacattcattattcatgtgcaactcattaaaccaatcaggttgcactgttctggccactgttctgccctgggaatctagagagcatctttcttcggttggcatcgcttgttttgagttagatgtgacgaaagatgactccgtccgagccttgcgcaaagcagtcgaggagaagattggagatcgactcgatattcttgtgaacaatgcgtaagttttcgtgacaatcaatcttcgatttggtttatttcaatttaacaatatatagtgggatctgtaagcttctgttgatgcagtacaggatgaaataatactaagaagcaggctatacaatgaccgccatcgacaccgatgttaaacaagtacaacagatgtttgacgtcaatctctttggaccaattcgaatggtaaatatcttccaccccttgctaattctagccaaagggtgtgtcgtcaatattggctctgtcggaggggttgtaccctacatgtatggctgtatgtctatctgaaatatgggttcggctgaaatccacaactgactgcaatgtagcttcatacaacgctagtaaagctgcactacatcactggggaaatacactccgagtggagatgagcccattggggtctgtcaattatccacctctctaccttttcgctcgctaatcgttcgaacagcgtccgagtcatcaatgtaatatctcaagtcagtataatatatgagtttggagactaacaacgcatctagattatatctggcaatattggcaccaatatccttgaccgtgattcatcgcgtactctccctccaggtacgtcggcaacccctgcagtttggctcccaaattgtcaactaatgaaatatgtagactcgttctacgctcctctgcaaacggagttccaagctcatgtccaacgagtgcccggtaagctgaaatattgaatattgttcgtgcaaggtaggctgatcaacagatacaaccgatcgcatggtgtatgccaaatcggtggtgcagcagtcactaagagcatgtccacccgcctggcactgggtaggcaatacctcgacccttgtgtggtttatggatatcttcgcgtttcgcactatctgggtaggtttttactcttcgattttggacacatggcatccactaataataacaggactacgtgctatggcctgtctttagtctggggaaattaaagcgcgcgatgaaatccaggtctatctagataaccaatcgacaattactgtctttcaataagattactagtcagcttccaaaatttagttgaactgcggcgagcgagcatttcgattccagggcacatccattgtagtgtttctgctggtttagcttaattccttacataaaaatagggtaatactcaggtataagatatgctttattcaaaatcgaaaatattataatgttatcacttttctggatcgaaataatccatgagtgttttgtttatattattgtataactctgagcatctagtctatgtaaatcataaagccgagattctgttaatatggccattagaatgtatgacgtccaatctagattgagtctgtgcttctgtgtcattcaaaatcccaggtctgacgatctgacactgtttctgacagtctgacatgcaggatgtcactacttttgaaatatataaaaccgatcaaatccatcgctacctaggtaacatcgagttcaaacagctatctccttttaacattcccatcaccatgtctcaaacttccgggtttcccagtcttcgccccgcctatattctcaaggtgtgttatcaaatgcaaaagcatctcacttgactaataaagagatagctgcaagtaggagagggccagcctgttggtatgaaaatactattgtgtacattacatcgcctcggtctaatcattttctgtaggcgcaacatcttcagggtcgacctttgtccactatgtgagtttccagtctcaatctaccagatgaactgattcctaacttttgttcagagcaccccaggcggaagcatctccactgtagagggattttcacctagcatcgatgccgaggttgtatttgctggcgactggttgtatttcgatcccgatcagcaacatagtcggatgaatgtcaagggtgttgcaaggtgggtttatatctcacgtgcttaattatatgaatcccactgacaaatcaatcagaaccactgaaggcgaagtgagcaccgtcaatatcagcaagaaaacatagaactaatgaactggcagggcatcaacttcgcctattcgggcgtttccggagtttcgcccgacttgggagccattttccaaggacaaccgaagactattccattcggattatccagttagttctttgacataaatctgtatgatataatacgctaacacattatctagccatgaatcccacttttgaggttggtcatccccgtctcaaggacctcgagaacaacacttgggttggcaatggccgattttcgttggagggagacaagttatacgtggaggtccgcatctcgcaggttgtttccagcaaggatatggattagatggactctttgtgttgatagtagcatcaaatcagctcctaaacttgccaattgacccatcaatatatatctttaacgaacaacacatacaaaatcaaataaatcaaacccgcgaaggggcagattggccaaaggtcagatgcctgattttgcagggttgatgcctcaattcgcctgaattatgccttatcttagactgtcaggaatcacaggatagagggctcagcaaagtattcaaaaacaatgaaggtattcccatataaatctccgtatgcatctatttctaggcgctgaagctgcgaccgtacaactaatttatgaggtgggaatagcttcaattcaatggtttatatagtcggggatggttctcaacgctagggattcgaagaaactgatattttgtatggtgggaatagcttcaatttacagttcacgggatagagcggtgtcaaaagcggtctataattcaggcatattcaggcatcaaccctgcaaaatcaggcatttgacctttgaccgccctgccccttcgcagatcataacaaaaaccaggcctagggggaccatatcccggtctgacacaatcgagtaaaaatgaataacatttgagtatgacggataagttactctaatgaccacgactcatcccgaattcgcatgaacggcgccatatcaacatcttgaccctgttccctcttcagctccaacgcagtccgtccgtccccaagatacgaccacatattttcatccaggtatttgatctcgtaatcctcaaaacgaggtgtcttgagcgtcttgagcatatgcagcatacttccagaccacagctgaattcggttgttatacttcatccatgattcacatgattcagcccatactgaatgctcatcgtgccaagtgtctacatggcgtcgccattgtgtcgttacgctttgcttgggagtcaaagagtgcaaattctcgttgctgatcttggcagcgcactgaagcgcatattcgacttgggcttcgtgctgttggatttagagggtcagctaagcatttcaccagagtcgagctcgagagggattcatacagtaatcaaaacggaaccctgggcccagtttcccattggtccaccaatgaagaaaaagttggggaagtttggtgtgctcatgctgagatagatgttgggggacttttccagttagccttcctttctctattctctatatctgtaggtggggtattacttttgcccattcttcgcgcatagtttgtccattcttgccggtcacggtactggatatgttagagtcatatgccatactcagtggaaacaaaagaaactcacaagtgaggtgcgaaagcaacatcaaaaccagtggcacagatgatcaagtcgaattcgtgctcaactccttcttttgtttcgattcccttttcagtaaaccgcgtgattccactcgtgatgactcggacgtcttgatagtcagccttttgcaaaacgacccacacattcaagaaatgaacttactgtcttctgtcaatgcttccaagaagccatcgccgggctgctatgtcagcgcacctactttcagaagatatttgtaagaacttacagtaggcctacgacatccaggcgaaaagtcaggcgtgaatagcttggccaggtcctgccggtctggtccaacacgtgccttaatcatctgggaaatcatctcggtcgtcatatcatgcatgggatgatcacgcaggaagattgggaatcgctcttgcatgactccatcgacagatttgcgatattgcaaaaagcgagcaggatcgttacggaatacttctttctcagcctcggtatagaaatggcttccagccggtgcgggcggagctgacttctcaggttcatcgggaaacaagcgcagatcttggaatgccgctgggggaacaatccattgcgtagaacgtacaaacactgacagtgatttgacgtctaacggtgggagtcagcagaaggttatatcagaggggggccataggagcatacccttgacaatttgaggaatgatttgaatcccagatgaaccagttccaatgactgctactcgtttatccttccagtcaatagaggagttccagttggctgtgtgcgtaaggatgccacgatagttgccgatgccgtcaattttaggccctagaaggattagcaccagatcatagatgcagtcaaaacatgagcatacatttccatttattcaatggcccagaaccattcactagaacatggcatcgatccgtaaagcgagagccgtctttgcgctgcagctctagttgccctacatcaattagttatccgtgattatatttgatggtaggaagacaaacattcgccatcatcttcgcaccaagtagcctcgactacctccgtttcaaatcgaataaaattgtatagactatacttcttggcaaagttgacaaaatattgctggatttccggtcctctggcataatatccactccactccggattgggttcgaaggtgaaggcatatgaatgagccggaacatcacaacccactcctggatatctaatacattgattatttgaattaacacttgtttaatagagtttgtttaacggggggaaaagaggggaaaataaaacgtacttgttttcaaaccaggttcctcctacttcggtgtttctacaaaagcgtcaatagtagatacatcaagtctagcaaggcggttccttacttttcgtagacagtcagttcatagttggatagcatattctttgccttgtaagccatcatcaaaccagctgcaccagcgccaacgtggaccactttgagccgccgtggctccgagtggcttttttcgacatagttgttcgatgtagaacccatgatgaataattggctgatcaaaatttgcacacgctcgaccaaattatttatattaagccttttgggtcgatttctgactgtctgacacgaagcgtcatgcattctgacctgacatgcatctttagcgtctagccgaaattagctaactttccatgtggtcagatctcagcctccatcaaggaactcctgtttgcattgagatctccgatatgcaggtctccggatgaaaaccaatgaatgattgacatagggagaaggaaaaaagaagatgcagaaggtaagccaagctactgaaaatagttgctacacctaaagcggagtaaatggctcatttcctcaacagcttattgtcatctgtagatgagtatggaattaaaggggtcatgcctcgtaaagtgatggcacgattcagctgtcctgacaatttggcccccatcagtgtcaacctttgaaatataaataccatactgaatcatctcacattgaacaaacagaacatcatttgtaagattcaatctaagcactcaaaagttgaagcttggcgatcaacatgcatatgcaaggaaccatggctgcatctcccctgctcttcctgtttggggttctctccttcgtctatctagcagccgcttctaacatctcgtctctcgtgtctaccctttcttcctcctcccagatttactaccccagcgatgctgactgggctgacaccgtccagcgatggaccgcgtgggacgagcccaccttctctgtggccattaagcctgcctctgttgcggagctccagtctgttgtacgttttgcctctgtccttgttcttttccatatctgactatgaaataaaacaggtcaaatacgcttccaaatataatatcccttttttggccagtggtggaggccatggatatagtacctctttcggaggtcttcagaacggtttgaagattgacctaagcctgtttaacagcgtcagtatcgacaaatctgcaagcacaatgactatcggtggttctgttaagttctctcaagtcatgggacctctcttcgaggctggaaaggagattcgtaagtatctagtccatgatatggggtgcggattcttctctctaacactttactaatagaaaccggctcttgtccttgtgtgggaatggtaggtgctactctcggcggtggtgttggcagataccaaggccttcacggtctcatactcgatgctttgaagtcggtccagctcgtcaccgctgctggcgatcttatcaccgtctctgccacgcagaacaaagaactattctggggccttcgtggcgctggatttaactatggaattgttacctcggctacatataacgtccacgatctcacaaacgaaggcaatgtgctcaacgccgactttatgttccctgctagcctcaacgaaacttatttcaacatcttggctagttatggaactttgcccgccggtctgtccttgtataccttggtcatgaatagtccttccgtgggagtaagttctttcaactcatatgctatcagcagcctggctcattttatttagcccgttatcctcctgaacgccgtctatcccggagctgagcaagaaggactcgatcttcttgcccccttcctcaatctgacctctattcaacgcaacatcaccatgattaagtgggatgctgtcgatgacgacgccggtttcggtctagccacggctttctgtgtcaatggtgaaaagcacgacatgtggtccctcggtgtacgctccatcgacgcagcaacacacatcgattacttcagcaagctcgttcagttctgggaagactatccctctgcgtcaggaaccacctggcaggtggagtatttccccatccaagctgtcactgctgttgcggatgcctccactgcctatccccatcgcgagatcagtgcccatgagtaagccttctctgtttcattatgtatccgtgtgattttggacacccatttaacacttgattagaatgttttcctttaacattaccgactcctccctcggcgataagatagacgacttcgcccttgctgccctggagtctttcaacgcgaccagtggctttgatggtgatatgcacatctacgtcagctatgcccacggcaccgagggattggatcccatgtatggtgcggagaagctgcctacgttgctgaaactgaagaagaagtgggatcccaagggtttgttcagctataacaatgggttgcccaactgatgaacgttgtccttgataattagagttcatgttgtattctatattctaggatagtttgccagttaatgaaagatgttattatacgttctactgaccaaatttcctctctctgatcacctgatctgtcactatgaagctattcagagatcatcttatctgcctacggagtacaaagcaatctaaattaattctatcactaccaatcatagtataacctcattctaaagcggcacttaagtagtatagagtagggcttaccgaatgaattaaatatgaccagtaattcattctatttgtggcgcaaatatataaagaagctcaagtcagaatgaaaattctaccattgtactatcgttatgacaaattacgatcgcatttaatcaatcaaatactctatattatgtagccatttaatggcttttttagaattaaagtatgtctgttattggtggtggtagaataaatttacattgattgacagatcaggtgatcaggtgatctctgaatagcttcatattcacggattattaggtaatctcaatataaaatctttgaccctccaggttacaatttaaagatagatggtattcaattgcaacaaaaatgtattgttaaatgtactccttgcaaaatccccgaaatatattctaactaaagctaatttctcatcaactcggctaggttcaagatgttcatggtaaatttgggcgtgattctcatttcctaggtgtgcttcgactcatttttattgctcaatttacgtggaggtgcgtataaatatatcgttcccattcagtatcaagtatcaagtatgataggcagtacatccaaatcatgcacttcttccttcgtattccttctccaactcacccaaaaatccctcaatattctttccctgaaccaggacctccttacagtcaagcaagacatacaacatccgcccagcctgtgtctctccagcagtgatattcttccacttgtgcgccgtcgcccgctgcacactaatgtcaccctgcttcattatgcgtgtctcgccggagtccagggtcaactcaaattcaccatccatcacaatgccataatcgatggacatggcccgatgcatgggcgactccactccaggaccaaaatcgatcatacgtacgaccgtgccgttggtgatgtggagaccgggctttgttttcgtcaggtctgcgttcatatgaagatgtgttaggcttgattaaactaacctcgttctccttggcatatttgatatctttgtcctcgttgaggtcgacggggttctcatgggtggagtagataatattggcaacagcctggttctcacccatgacacggtggtggtcgccattgtcggtgacgaggaagtgacctttaccgtcttcttctttgttgccggtaatgagacgttgggtcgcgcgcagacctggggctgggaagccgtcggtgatgaagttgatagcggcagtggtagtcatgatgaatgtttgtgtaatgggatgtttgatgtgttgggtggatttaaaaagtaaggagatagcaatcttatatatttagaaatatatttctttatgatacttggtacctgaatctgacattatctgacattatctgacaatgacatcggggaacgcttaagcatgacttgtcagagtagttcccccatcaacaatccagctactaccagtgacataactcgctttggggctacataggaacaagatcaaatcagttatctcgtccacgtgtgcaatccttcccattggcacggcctttgcaatcagcgccttcaattccggattcccttgcacggcgcggtccaccataggcgtatcaacccacgaggggcacaggcagttgacacggatattgtattgcgcattatccaatgcttttcttttgttagaaattttctctttctgtccatttaaatcatgtcagacgtaccggcgtttcgagtcaaaccaagaacggcatgtttagacgtggtatactgcgtcaataaaggcgtcgccacgaacgatgaacaagacgccatattgagaataacaccccgcgtagaaccccgatcgggatttttcgagctcacgggcttcagctgttgctctttcatggcgcgagacataaccttggtgagaaggaaagtccctttgacgttcacgtcgaggaagcggttaaattccggcagggatgcttcggcaatctccgctgcgacttggacaccaatctacatagaggcatcagaaaatcaagtagcaagaagatggagagaaagctcatactccagccgaattcaccatgtaatcaattcttccaaacgcctgcttcgtctctgctaccacggattccacctgctcctcattggtcacgtcgagggtcaatacgagtgctcgatatgcagggtgtgttgccaatttcttgctttcttcggctgccttctcagcgctctctcggttcaaatcggcaaagacaacgccagcagctccttcagaagcaaaggccaacgcgcaggcccggccaatcccgctccctgaaccagtaacgagagcaaatccgttgatgctcattgtgcttgtggaaataatgacaatagtgatattttagatgcggttatgctaaagttaaatatttccgttggaattggtggtatcagatgtttcaagtcagcctcaagccacctgcagtcagggtcagacggtaatatttctaattagttaactttcggaaaaaccgggaaattctatgtataatgcgtgtagttgatagagggagaaccatctactcggaacaagttggcttttggggtcgctcatgtccggaatagattatgatgtactttggttcaccctctacctccctttctttcccttccatttccaaatcaaccgatgaactatgccgtgtactttgctcccaagatgtaggcaactcatattcgatccgcacatttggctgtttagccaactcagccagtgccggattatgttgaatcaacatctccactagttcctgctggcttggccgaggcgcttcccgcacggccacgtggcagccacaattgctgcattctaccacatcttcttgggaagactgataaggactatcctcggttgtagtggttgtggtgcatttcttccatggacgaaataattgcttccgtgtcgtgccattgcttctagaagctcccatttcaaagccgcgggatagcattcgggtactccatttgactgggcagcctctggacgacatagattcgttagatgtatccaaggaagaagacaccgcgtagctggatcggggagtgtgtggcctggaattatcgatgtggattaaaacatttccatttttgaattccctgggatgcaaagacggaggagagaccaatgtgtccatatggagaatttccggatccaaggcgatctgatcatcatcagttgtaagatcaaatggtagagagtcgaagtcaaagtcgaagtcaaagtcgccgagttctgcatctgtcgtctgcgatggtgtagtaagtgacatctcgtccgggctccacggaatggtgccttcgaaaggcgagggagtattcacgtcgaaatttgccatgtcgaagtttgcctgccattcgaggtcgatgggaggatacaaagcgtccatgggatccggaaatgtttctccaattgagtttccagcggtatttgccgcagacaaatgagggctaccatctatggaaggcgttaaagccaggatgttgaaggggattggctggttttgcagcttcctcttcgcccctgtaattgagttagtggatggatacagtctggcccaggaaagagaaaaacatacgaagcttgcgttgtgagatacgattttggatgcgtttgcgcaaagctggctccgatatttgactccagtcctctttatcgatcattttatcaatttcatcagttgaagccattttagccattgttgagtgatagatgattgaaggtaatcaagatagtaatcaacgcgtgcgagaagtggatagaaataagacaatttttgaatagcattcccatttatacttcgtactggataagcattcttcagatagattatcgtgatcttgcaggagtataacctctgctgccgttccaacctacaacatgcctcgtgttttctacgagctaaacctcgacgggagcggatgtatgcagtcagcattgaaaaaagatgtcagcaatgatcaaaggtaccctgcaggagagacggtattattactgcattttttaatcattttaacaatagttacggttgttatgctactgtaatactctatttttatatagtattctagagtaagataccataaaatacccgcacccatagtggacaaatcatacaaaattaagtgtattgttacaatacaacggtaacatattcggtaaccgagctggacacgcaagaccctaaagcaccatagtaaatgtgataaatcacaacttgataactatctgtagtctataggaacttttacttctaggttgacgctattcaggtaatttataccatctttattggtttagacatatatccccagcttttggcaacggaattatcggtaatctttgaaatgaccataatacggcgtcctactttcttggtaactgacatatagtactaataagccttatcaatatctatcggcaaatagagaaataaattaaatatttggtttggttgttgggatactgaaacgctgaggtctctggacgatcgccgtcatgcatgaggcggcggacgaggctccacaacctcaccactcagcgagaggctatctggccggccccaaccaacgggaccctaccagagaatttactggtcgactacggagtactccgtacgatgtggtcaagctggagaaaccgggccggtggcaaatcggagttgagaattcacatcagccccgcggggtgccgtacgacatcccacccaacggaccgtcgggttggtccgatccgccatcaagagtcgggtacgggttgcctcggacgaaactaatccgtggaggagatggagtctcagcaaacgaagtgaatcgaggcgccctgtggcctctttcgctccgtttggatgttgacagccggagaaggcagatatagatagtagctagtcctaaccttctctcttcatcaataaaattccgaattgacatcccacctactcccatccaactaatttcagtagctcggcaaccgtcagtcacaagtgtagaatatatcgcatttactatgatgtttaaggtgtccagctcgcttacgtgtatccatgctattggaatgcttttgttacgaataaaggccgagatgcttcttttgttattttatctgtactattagccgacatacggagtaacacgaggacagatccactagcaaaaattccccgatatccatctttccgcccccatacctttccaggtatatggtcgggatggtgagacgactaccccgtggcttttcgcttaatgtaacggttcaatttctaagcaagtcaaagcagatcgggatttccgataatcaagatgtatttttagtttatggaaaacggtccagccgggtcttgtggagagccatttctatgacttctgataaaatgaggggttggtactattaattcactcgaggaagcgcactagtagatcttgattcttcacgggttgtatatgatcaaataatcatttccatggagtgcttcgcatgaatcatgatttctcgcttccagttcatagtacccatgaatcaaacgtaccatgcgtacacggcacgtggcactatgcacccgcttcatccgaatccggtctagttatcatgtaagagaggctgagattggctatattcgtgatgataatgatagaaatgagcgcgaaaatggggcgagaacaatgcaaaaatgggttgaaacaagaattgaatatctattttggccaagtgctacaaaattggaagttgtatgagtgaattagcgttagttatttgtttgggggattttcgtagcgattgataattcaaccaaccgcttgtagatacttacaatttgtatgtaaatctctagcaaaattaagtcacttttatcatatcaactgctttatcatcagggggttagatcatgtaggaatcaggtagaatatcagattcttttgggatcaaaatgcatgtctttttactctgtaaaactagaagtgggcagaatatatggcagaaattatggcagaaattatggtggtacttaattaggaaggaggtactggaagttcaggcagaggggggggggtggatcttatccaagggggaaggtagcattatcaatccctttgttaatatagtaaaacgtcacatcatcactcaaaacgtcaaatcatataaaatcagtatgaaaaatactcctcccgcatggtagaaaacaccttccagatctgtgtcgagcaattcccccttaatcgtcgggcgatttcatctaccaatctgatgacgcgaccttccagaaaccattctcccctcagtggctgtagaaggatagcatagtatgacaatagcagtaaagcacccgggttgttctgtttcaatagggccaggtagtcaggcgaaacgcgcattggccatgaattaagagcatcccagatactcggcgaaggtccgcaagtcttgataaacgcaaaagcgactgccaatttgacagccgaatcgcggtatatagagcattcagcggagtcggattcacggtccggtatgacggagagtagagtaattagaagtgggtcgttggggtcggcagtgacgccgagatcctctcgccaaagggttgtaaaaggtgccaaggggccagtactgagttccgtccagacgggacagagcatggagcagccgttacgcagtatctcgatccagtttgatgacggcgcgtcttctgggttatcatcattgctaagaaacaatggttcgtcgttggattgggagcctagggtatagacgacgaggaagaatgcaaaagccaacacggcctggctattattactatccacgtgcatagttgcccatcggaatgcaggggctgcctgattttggtgtcggattgactggatcgtgtaatatactcgattgggtggatcgataaaagcaaggtggatggcggaacaggataggattccatggagtaggaaggggaattgcgtgcctaactggggaacaatgattcgaaatgcatcatctgtctccgggccgcatgtgaggattttgtaggtatggttctggtaatgatcgagtaatcctacgtcggttgtgatcaacggttgtaagggacatgattctccatgattcgatcttgaagctggagttgtcacagcctaaaggaataaatcagttggattgatagtggctggtggtcattatcttgacttacggtactcggtagcccatcggaactggcagatgatgacgacgagatcaacaacgctgggttggtaaagtagcggaaggcatttcctcgaaaaaagctctgtaatggcactgggtcccagaagcctccgttatcagaggctgcgatatggtgaacagtcatccagtgctgcttcatgcgcttggttgtaacacaaagatgagcacagcgagcaaaggaacaggctagcccattttgtatgggcagtaaaggcactgggaactgggtttcatcgggcaagacgacatcattaggttgggtcagttcaaatctagaggcgtattcgatgaatgctcgacgcgatgaatgatgaagatggtggatttccttaagatggcgagcgacagcaccaggctggatagcgtagctgcaacgccggcagatcaatactcgatatgtaggcagataatgtaatagctcgggtggagtgagcccatccactgattttaaagtcatggtgatgattgcctatgaagagaaacaatccgcaaagatattcttcgagtcatttcagggggccaaaatcataacgagttagcttctcgcgctgttccaaatgccaatgaatcacgatacgttgatctaggcgggattgggaatgttagtcatcatctgatcaggtggatccgtttacggcagcaagtgaatgcgacagctttctcatttagaagtataggagactacctaggtaagcacaaaagacaagaagaattgaccaaggacagcacattacgcatgattacacaaaagaatcaaaaaaagaacccaaacgtcttcacaagaatttaaatctgcgacaacaccttgtcaatgtcaaccacaggggccaactcggagattgtctccttccacacctgtgcctggatgattctgccagaatcactgtctccatatcctgcaaatggagcctgcttgttgtcactcaggtacttgccattagaggcatcgccagccaacaccgatgagtgaaccagggtacgagcgcccatggagacagagcgaccgataactctcttcatacctgcgagaactttcccaaaggcaccctcagccgtgcggtgcaactcagagccataacagaaaccagggttgaccaagttcagaatggcgcccgtggagcgcttggcgctggatcggttgcggaacagctcaaggaagaagagctggtagagcaacttggaggtatagtaacgatctcccatgtcgaaattggccttgtcatccaagacttggataaggggaagtccctgcttgatagatacctgagcctcggggaacttagcccaggcggctgtctcactgccgacgatggaaatcaccgggcgagcgcggttgaggttgttggcagcctgttgatcaagcacgggtaataatagcagcgtcaggagagccgtgcttagccaattgatttggatgcttgactcgtgagaggtgggttggttgatggtgaagttgaagttggcaacaccggcgttgagaagagcaaagtcgacctgaatgtcggacttcttgaggcgctcgacaaaggcgatagtactggcatagctgcctaagtccagctcccagacctcgaccacggggggcttgaccgaggcgggaagcgaggcgagaagggagtttcgggcagcttctcctttggagatgctacggacggccaaaatcaaatgggagagtccaaggccgagaaactgggcggaagcttgatagcccaggccagtattagagcctgtcacgatacctgccttaccgcgaagggaggtggtggatggggctttggaagggcagaccaagaactggcgatagaggaagcctgggtaagagttatagaaaggcattttgctgagaggttggaaggggaggaatatgatgagaattgaaattgaaaggcgtcgcaatgcagggtataaatactttcgtccttcattttctatgttgtgcttgcaacgttgtcctagatgcgtacatggatagatgtgggggcgaatcgacggtgccgttccacgctgtgattggtcaggaataatttacacagaacgggaggtgccgttcccaacttcgccatcagagcttgaaccccggagaagcatctgactactagtagtcagactgtcatgctgtcggaattaaggtactgacgggtttaatgggcttaatgggtttaaggtagatgagtctgactccccttctgacttttttggtggtttcaagtaaccgctcttacccactgattccgtgagagatttttgatttgcgagctttcgaaatggcagggatgtctccggtccatatacccatttgagcagaaatctaatcccgttgtccggccgggtacgcagacatacctctcagggttcagagcccctttgaggactgatgcgttcatgccctattttggaacggcaggaaaattgaatcatattgtatgttgtagttagttaccattacatatgctttaataatcaaagtatgcaatcagtaactaaagagaagtctgacctagcagacaagacaggtaatgagacaagacaagagtgacacagcaacaccaccatccaaggaggtcagctagtaagcgtagtcatacagaccatagcaatcatccttctatcctaatagaacatagtcctgtaaactccttttcattcccttttcattctgtgtgtcgtgtgtaggtattcctcctgtgcgctgagttctaactatctgatgattccgggtttccccattcggtactccgtattgctggcagaactacccgtaggcggtatggcacaaagcatgaaggcggtgtaaacttgcaaacgccaaccacctccaaaaacagagatgcaagaatttgtatggtgccaaaagcttcatttaatacatggataacttgcattacactgtataaagcggtgtcaagagtggtgctaattagggcattcaagcatcaaaacacttcctaaaaggggctatacgtctgcgtagaccgggatttgtaaacatactagacatgccacatttgtgatagtcatatattggcaccatgtgtgcatgatatcctggaagcaggaatccatccacgcactatcgcataaatcggacattcccatcacatttaatagtaagtcatacctctctcgggtttaatggcaatacacgagccacgaaccaagaaacttctatatatatccaaattatgtctatcgcattcctctattgtatcatattttgtcatctcggcattgactagagcagtcacactcgctgcaatggcatattttagcttctacatgcttatcttggtagttaaccctaataggagatgatatgcattgatctcacattcaacaagatatatgtacataactccactaccaggctgtcataccaccatcgacccgaatatctgcagcggttatataggagctctcatccgaagcaagaaagctagccacagccgcgatctcctctggctgcccgatacggccaatcatgatcttctgcgttaaatccgatctccattgcgggtcctcaagcaaaggtgcagtttgcagagtctggataaggcctggtgagattgaattggcccggataccatgctcacgcccttccatggcgaactgacgtgtcatggcaataacaccacctttcgtagctgtgtgggcgatagccggcactccacgaattgcaatccagccgttggcagagccaacgttgatgatagatgcacctgactccttcagatatggccatgcaacacgagtcaacaggtagacaaggcttaactcctggtcaattgttttgtaccagtcgtcatccttgccgtcatcgagccagctcatgtagaccattgctgcattattgtacagcacatcgatgcgtccatatgtttttatggctaggttgacaaattgctcgcagttctcacgttttgtgagatcgcatggggacatggatatcatttcaccacctagctctcgtacagctttgatggttgctgcgtcggtcacagtgttgatgtcacagccgacgattttggcgccttcttcggcaaacttgagggctgctgcacgtcccatactaccgcctgtaccggtgataagacatatcttgttcaacagacgcggtgccatgacgattgctttgggattaatatatgtcaagaaaaaaggatttggacggtggcatgagagtctttctgagaagagaagaatgtcacagagggcagggtcaagggggggccggttagcaagactaaaagaactggctggttagtaaatatctatttgaatgtttgctttttcggggaacccaatcaagaagacttttgaatcttttctttgtttgttttcccacatcaaataatgactccaccggctatcgaaccggaaactcagtagctgcatattgtggctgcgatacatgatcgatggagccgattgcgtccacgatggacgatcggtccgaattcgatagtgtcgatttggaattgtctgccagcgccttgtaaccgaggcttctcctagtaagttagctcttagtggaccaatagcgtacaaaagaaatagtatatacccctggatgcccatgaatatcaacgtcgcctacttcctaaatcagaacactaagctggtttggggttcttgatgcggatgattgcaggtcggaaacttcgagcattctttgggcttttcaagattagccaatatttctacgctctgggtgggcacgagaaagcgctagagccagaccatgtatcaaccctaggcgctgttcataatatcggggtcttatatagtaagcaagacaagctaggtgaggccgataggtgaggccgaatagatgcttctgcggctctaactggacgtgagaaagcactaggaccagaccacacatcaactctagacacatttaacgctcttggagatctatatcatgactaggggagactggatcaagccgagcagatagatcccgcaagaaaaaagaatagccctgcacctgccttttttctctggtcatctctcactatcatagaaaaaagaggggttgtgcaatgcgagccagagaaactgctacgaagatttaattgatgcttaacttcaattgatttactcccatatcgtttcgtcccatagcagcaaaaaaaagtgttaaagccattttattaagatacccttttgaaagagcgcatcttttgggcaaaaacaactgcgtgaccataaatatttgctaacaattaaaacggggaaattatcaatttaatttgataaaaaaaaaacaatgggacgagccgggatcgaaccagcgaccttgcgaacttcagtcgcacgctctcccaactgagctatcgtcccatttgggatagagataaaagcttaattaatattataaatcaaaaatcttttgccggtgtgggctacatacaaaacgacatagaaacccaccatagcccacggtttaaaaatcataagaattagatagtattacaaatgatgtctaaaaatctactcatcttatatatttacatcgttctcaggcttcttttgtcttgcctcgcctcggttggtgctgattcggatctcgtacacgtcaacagtacaacaaatcgatactatccgaattatccggttgactaatatgaaggatatatattgtaataactagttaaataaatcgggtcccatatatggctccatagagcaggccaccgaatcaaggatccatatcaaactccggattgacccacgaaggctgtggtgcttttgcacgcatccaagccccaaacatatgcagaccaccaaagaccaaaaacccgccaccaagtacaataagtccttgggcagtgaatgtccaagtccaaccggaagacgcttgccaattggcaatgaagaactaccaagaagtcagttatcaatatctaaatagctcattatcaaggtggattggacaacataccggattgataaaagcactcaggttcagaaatacggcgtagaaagtgatcacgctcgttgtttgtagtgggtagcagtccacaatgtagctgctggttacagtatttccgatctggataccagcggcaactagaggattgtcagcactgcgtcgaatgctttatgatataatccggaagatagaactcacataggaagaatgccacctggcctaccatccagtggtagtttttgtcgatactgattccccaaacaaccaacccaactataataattattattatcagtagagttcaacatatagtctggaaagtcaaacacaccagtggtgatcaatatagccgggtacgccagccacaaccgcatctccggaacgcggatattgccattcctcttcgccaacttctcgacaataaagtcacttaatcgcccagagcacccaatctccgagaggacagtcccaagaaatagcccaaggaacagcagtccctggatcagaggtgtgtagttcggatacgctgccggtaccatcgtgataacagataaaacccaccagtaccagacgaagctgaatccgacaactgcgataaccactgtggataattggaacgtcaatacaaaccgagtgatggagtcccacggcttgggatggcgcattccgggaataggacgccaattgatgaaagggaggttctttgtgcggcgtagctcggagggtagggtctccggagacatggatgtcgccgtgtcgtctcctgctatttgcttttcaacatcactcgggagagctttgttgccgtcaagacggggcatttgctgaagcatcttgttgcgggggtagagggtctccggcatgaagaagagttcgagaagtagtagtgttgcaaagaggattgcgttgaaccagtttatccatggggcactgacgagatccaaaaagccgccaactggtgataaatcttagcttttgacgcatggtggtttgaactgtccgaacaacttacaggtaggacctagaagcagaccagcatcaattgctagaacccacaagccaagcttctgaccacgctcataatcatagaacagatcggtcactttgtcaaactagatgtcagatacaaatcttgtctgaaggtgatgattgagacataccgactgccattccgactgtagatgctgggctcactccaaatccttggaagaagcgagcagccatatagcccgaatagctatcagctccagcagccccaatagtcgaggccagtgatatggttgtcccgactaagaacaccacccgtcggccaaagatctcaccaagggatgaccatatgagtggtccgacggataatcctaatgctggcacggcgactgtccagttgacttgcgaatagttgatcgagtattgatcttgaatctctggaaatgagggaactgtggtggttgtgaggtatgtgaataggaaatatctaacaagggttagcaagatgtcagcaagacgtgtagattgttttctggcaatgtcgagcaattcccggagctgatttggtacatacttgaacataacgatagatagtatgccatttttctggaggcttgaccaatttaatggatctagggggtctgatgttggctgggggtgaagtctgattccgttcttgtcgacggctgcattgtgaaggacttgagtgccctccatgggagtattggttgggtcgacatcgtcgttttggttgtctttttctccaaactcgcgtttgtcatcgatttctgttgggcaagatgccatcttgtagactcttgcgtttgaatacgtatccaagagtatataggccggcagatgactatgatattagagcccgccttgatctgggagatgatatatataagacatatatactagatctgtcgattatctgttgccatgtgctgaaccaagctttggctgtctattggtcgtgctgccggggggcccggggtagaatctcggaatctcctgatgaaagggcctagctgataagcaccgcattagggtttctataattccacgaagcacgtttcagcctattacatctaatgagcctcggattgtgaaagccatggcactgcatactattataaccattgttttgattataaaagtcgtccttaggggaagtcatatcatctcattcattaggtatacaactaaacagtcaagttacagtcaaattgtggccattcccttcttgctcctttctgtgtacacaaaccattagaatggttatttcataactatcaggattatcattgctgcaaaaagcccgccactatcaaagtgacaggagtgctgaggacgttgtctgcatgcaccaatcaaactggccagagacgatgataagaggcgaaagataaggcgctctagtcaacttccacttcgaggcaacaattagagaacatcagtggacttccccgtgttagagatcaagactagattgatctattcgatctcattctccaatcttgaagccacagaagtgttggctctaacatgttcgcgtgttgtataccgaataccctgccgcgtcgaaccgtccggtatcggacttggacttgagatactcgaccaacagaaaaatacacatgtcatggcgattattgctttgattatctcaatcatactggctatgtattatgtatccattgttgaatacacatgtagcgaattttcgtattactgactggtaccagatattcgtgcatatacaaactccacgctggccgtggcataatcttgaaataaattcacactttccgaatcgaaagcagtttgctaacaggaagtattttcgcttcttccaactcccttgcttaacaagtggaagaactcacaccgtactgtgcccccacttcctaaaaaccatcacatattgaagccggagccaaatttactacgaagcacatatcgccaattccatcatgcccaacccctccagcaatggaggctcaagtcaccaaccaaccgagtatacttccctcctcgccaagcccatcaacgatggaccaacattgcacgactccgaagatgaaagtccattctcgcgagccctcatcctcgccgagttctggctcttgctgaaggactctactcccgtaatcttagcctacactctgcagaacagcctccaaacgatatcggtgttgatcatcggtcgctcatcaccggagaacctcgccgcgagtgcattctcgcagatgttcgccatggttacggggtggatgattgctttaggaggtaccacggctatggacacactcgcctcctcctccttcacgggaagctccaacaaacatgacttgggaattctgcttcagcggggcttcttggtcctgggtcttttttatatacccgtcgctatcttgtgggcttgttcagagcctgtctttttgttccttgggcagagtcctcaactctcacacgacagcgcgaggttcttgacttgtttgattcctgggggtttgggatatatttatttcgaggttatgaagaagtatctgcaagctcaaggtatgtttgcacgagattgatccgggtatggatactaacatgaccatcatataggaatcatgcgagctggaacatacgtgctgctaattacctcaccattaaacgccggtctcaactacctattctgctacacattcaagatcggcctcttaggcgcacctctcgcaacgggaatctgctactggctctcatttgcattgctagttctctacgcacgcttcatcaacggcgcagagtgttggggcggatggtcgcgcgaggcattccaaaaccttcgcacctttgcacgactcgctcttctaggcattgtgcacgttggaacagaatggtgggcatttgagatcgtcgctttagcagctggccacctgggtactgtctcgctcgctgctcagagtgtcattatgacagccgatcaagttctcaatacgattcctttcggaattggagtcgcgacgtccggccgcgttggtaatctactaggaaaacgagatgataccggtgcggcgcgcgcggcgcatacctctgccgtgctgagtatggtttgtggtggcgttgtgctagctgttcttatcgggacgcgggatcactttgccaagatcttcaatgatgattcggatgttgtacgtcttacggctgaagtcatgccgtatgtggcgcttttccagattgccgatgggcttaatgggagttgtggggggagtctgagaggaatgggacggcagcatgtgggtgctctggttaatttggtgagttattactgcggtgcattgccgttaggtatctggcttgcgtttcatggctggggacttaagggtctgtgggttgggcagtgtattgctttgtatttggttggagtgtttgagtgggttattgttgcgcgcagtcggtgggatgtggaggtgcagaaggctttccagcgcatggatgtacatgagactctggaggatgcgatttgaaggatagtagatatttgattggctaaagaattagctatacatagagtttgtcatctcaattagatagaaattgaattgttcttggcgtttacaagtccgctagatgcgaagtattacaacacatcacagatgcgtctaacggttgtactgtgaacagcatcgcattcaataatacattacaatatactatactatactatacaacatccctattaatatcctccgttgtcggacaagcacactaccagatgctggatttagcagatcgccagccaccaatgacgaccggccgataagccatcgcatatattaataaccctaaatacatccccagtcagttatcttccccactaatatttatctcacgttcccactcccaaggacttcccttttgggacgggatagctttgccttgcatgatgtgcccttaaccgcatcccccaccaaccgaggctccacctgacgtcggttccttaaagggaagttacggggagcggggaggataaacgctgcctgccagtggcaaaggactttctctttgtcttgttttcccgaggttgactacaatcttgagctcatgagtgcagatagtacgattgccgagttcctgtcaatcgtgtctgtattagggcaataacggtagtggattactatcgcgtggcaagctggaatgtagagaataaatatcttagaatggatgactacatatatcatggaaggccctgcattttagcactatatccaaacgacttgtattcactttgacactttcaagttcttctctacataaatttgagtcttgatatcacaatgattgcctccatcgcgggcttggttgtcctctctgctctggtcacagctcatggtaaccatgaccagtctcaatcccagcttgctggtccacacgaaggactctggtacaacacactcccaggagatggcggcaagcaggtgagcagcccctttgataagctactcaactcaaacgaagccattcactaaacgaacaaggccgactctgtattctccggaatcacaactttcggccgcctgccctatttcccatgcctggccagtgatgccgagaaatacgacatcgccttcctaggttagtcattaccagccgatcgagaccatctcatacaatgcccctactcacatatctaccgaacaggtgctcccttcgataccggaacctcctacagacccggtgcccggttcggacctagcggtatcagacaaggctctcgccgcctcaatctctagtatgtaccagcccgggagacagagatggttatgcatggcacgaacaaggctgacgaaattatccttttagcggtggctacaatgtgcctttggaggcgaacccgttcactagcgatatgcgaattttggattgtggcgatgttcccgttacttcgtatgtttgcgttcgacgggagatacaaagacaggaaactaatccgacatagatacgacaacgcctgggcaatcaagcagatcgaagagggacacaacagcatcctgatgcgcaagccttaccttgatgctgataaacccggtctttcgcgtgctggcaagacccttcctcgtgttattacccttggtggtgatcacaccatcacactgcccttgctgcggagtatcaacaaggcctatgggcctgtcactgtgattcactttgacagtcatttgtgagtactcttagcattacagcatggacgattgactaatttgattagggactcgtggaagccgaaggtcttcggtggctctcctactcaggttgcgggtatcaatcacggcacttacttctaccatgcggcgatggaaggattgttgaagaatgataccaatatccatgctggtattcgcacgaccctatctggtccttccgattacgagaacgatggatactgcggctttgagattgttgaggcgagagagatcgatgttatcggtatgttatcttgtcgcttccaaggttggctctgtactaataagtgtcaactttaggaacggacggtattatcaagaagattcgcgaccgtgtcggaactgaaaaccccgtttatctttctatcgatatcgatactttggatcctgcttgtaagtcttgtcggagatgtctattgtgggttgtcggtcgctaataatacaatccagtcgcacccgctaccggcacaccagagactggcggttggtccacacgcgagctgcggacgatcatccgtggtcttgacggcttgaacttcattggtgcggatatcgttgaggttgcgccggcttatgataccaatgcggagttgtcgacaatgtaggttgctttgagtggtggaagatataacaaatactgacttttctacagggctgccgctgatgtgctttatgaagtccttactatcatggtcaagaagggcccgttgactattggggagtcgtctcatgagctctgagggtttgtggagctggtgggtatgtcattgtggtgtttgggagcacggacttcaggctttggtgtaacgagtattggttgaggagagaaagagaacatcggaaaggagttttgcatgtcaaagaccaaattgaaagtgagacatgatgatatggtggccgaggcatgttcttgtccacgatggcagttactatatacaatgtaattagattgcattgaaatgaaataaaatgaaccaatgattttacggtaccccatctggacacgcccgagaagtataaatcttattgcgatgttgtatattcaatcaagtcaaagggatccttcggtatagcgccttgcaactcccgatgcggtaagagtccggcccaactccatgccattttattaagatacccttttgaaagagcgcatcttttgggcaaaaacaactgcgtgaccataaatatttgctaacaattaaaacggggaaattatcaatttaatttgataaaaaaaaaacaatgggacgagccgggatcgaaccagcgaccttgcgaacttcagtcgcacgctctcccaactgagctatcgtcccattcgggatagaagaagatcaccaggttgataccatgattaaataatacaggatggtcgctttcctagggttctaaacggcatctacgaatgcaatggataaccatctcgcagtacacgagtgcctattataggtgcatcctaatatctttgaatactaccggaagatattaacgtagtaactcaatctactaagcgatgcaatgtatgtattaaggcctgagaaccatagaaagacgtaggaaagaaactgttatatatatgcagttggtgctttcaacaccagcaatattcctacacgagctcatgcagaaataaacccagactgtccgccaaaataggtagatacagtatagttatgccatagcggggtatcacataagctcatcatcgtcacccatatcgatcaactgcgtatgtaccagcgtttctccgatcacaaccaaatatatattgtaaccattgcggcgagtgccaggccatataaccttttaatgaacctcggaatgaaactacaaataagtggacatgattacaaaaatatgaccatggacctcgtatgacttcaatgtatatattcaaccctgcgtttgaattggaaatatattttgaaccgtggatagaaggcaattagtttcgtgattattcaaataataactagtcatatagcagaaccgagaggcacaaatatgcatatgcctattatgaaacgaatgcacacacgcttttagagggctgaatacgacttgaagaggtatcctgcaagtctgaaaagccgtacagatgatattcgtagtagtaaagtatgatacaaggtcttagatactcaggaggacttaggagaatcagataagaagtcatagttggttgcctttagtttcactagttcttggctctaccataatcttcatcaattggaattcaaatactgaagatgacatcatcccagatgagtcatacgaggtccatggtcatatttttgtaatcatgtccacttatttgtagtttcattccgaggttcattaaaaggttatatggcctggcactcgccgcaatggttacaatatatatttggttgtgatcggagaaacgctggtacatacgcagttgatcgatatgggtgacgatgatgagcttatgtgataccccgctatggcataactatactgtatctacctattttggcggacagtctgggtttatttctgcatgagctcgtgtaggaatattgctggtgttgaaagcaccaactgcatatatataacagtttctttcctacgtctttctatggttctcaggccttaatacatacattgcatcgcttagtagattgagttactacgttaatatcttccggtagtattcaaagatattaggatgcacctataataggcactcgtgtactgcgagatggttatccattgcattcgtagatgccgtttagaaccctaggaaagcgaccatcctgtattatttaatcatggtatcaacctggtgatcttcttctatcccgaatgggacgatagctcagttgggagagcgtgcgactgaagttcgcaaggtcgctggttcgatcccggctcgtcccattagtttttgcttgattttttagatcaatcgacgtgtgatgtccgatctataagcctcgatttgacgagagaagatccctatgcacgcgggtggctagttagaaagagcacaagcaacggaggtagtatcaggaagcactttgagttcggcaacaagtttctatagaagtgagaaccgtaagtcgacgtcttggccttatttattgatagcttgctgtagacgttggattaaatggcgcacaagatagttttggcgaagtacctcgacagaattgggcaagcagctgggtgtgcagacgatgaatgtgcggacctggcttgggtcaatgatgtagtcattgactggagtagaatgttagaagctgacatcggatacggagtatatatagggacttaggattaatggaagacggggtcgttgtcgggatcggaacgaggtgtgagcccagcgtcaagacctaatcccctaaaataactatggaaagagaaagtagaccgcaaatcccgaacataaacaataaacatagcagtaaaattgactacatgactatgaccaaaccgaaaagccacagcgggtatagaaaacactttcattgatcacattgcctcagaagacagggatatcacggccacccctccataggcagcggtacaccgtcccattcgttgccctgcgtcgcaggaacactgacctcctcctcgcaagtcccattaagtatctcatcagcagcaccaccccagcccatagactcaagttctcgaacaaagaaatcacgctcttcctccatcatagacgcaccctcttcaccgcccatgacatccttgtactggcgcagatgccaccagtgcgtaagaccacgaagtgcctgttccaacggcaaagcctcatcaacctcagcatcgacatcagagccagcgagccagtcgtcgcgcagctccgggcggcagtacaggtagatagcggtaatgacgcgcatgttaccctggcgccatttgcggccgcagtaggggacctgggatttgaagagtttgagggtgtagaagcggagatacgggtctggaatcttgaggcccttgcggagaatgttgcttgatttgtactgcactagtaagaggcagcggtgggctttgttgcgcgtgatcttttgcatgatgtgtaggtaattgatggcggagaagaagttgcggaaggagaatactttgattggttctttggggaggggcgcggttgggtagcctagttcgtcgacttcggggcgtgtcggtccgttgaaaatatccgctagggattcctcttcggagagacttgccatactgccgtttgccgttgggtcgcggtggcgggagattgggggtggcatggcttcgtcttcactttcggtgtcgccaccggagttttcatcggattccaaggggaagtccgtgttgttttgacagaactggaagaaactagtttttgtgttagtgagcgagctagcgaatgagattgagtaacctacgatagatcttcccggtcattcttatttgccaccgtttggtcgacgtcttggtgtgcgaacattttgagaatcaaggggatatagttggagtcgagtagcagctgtgtcatgtattcgaatttcaagatatcttgatgagttagcggcagatcagtaagacaaaaacacccagattttagactcacgagatcgcttaaaccacttaaggagaagtaacagagttccagacacggctttaccggtgatctcgcgaagtcgaatgttgtctagctcatcgatggatgcatcggaaaggagattgtgagagccgttcatggaatgaccgttactaaaacttatgttagaacgaattccttgttattggaagtgtctgagctcacctcatgccctgcgtagtctggctagtagcctgactgaccactgcgctgacatttgtcaagatgattttcaagaatacgatggtgatggactgaaggtgagatagagtatgggtctggtaaacagtaagcgaatgtcgagattaggtctcgaaaccgtacactcacataaaacgagtcaaccgcatccaggcgccgctggatatcaggatcatctgtctccttctctgctggcttcggtttaggctcggtcttctcctcgtcacccaaattctcctcgtcacctaacaaatctagatgttcgaagtcatctggcaaatcatccgaaatgttgtcagggaagtgagcagcgtcctcggaattccagccacggtcgtactgcataaagtgttcacgctcctgccaaagctgtcgcatcgcacgagtcattttcacatgggtcgagaaaagctttccggcttcaataattgacgcaggaacatcactgccttcccatttctttccaaccaaggcatcctggcgttgcgttgtgcccttcccgccaatgctgttgctagaatcatccagaggagggtacatgaaggggaaattctggttggtctgatagttctgtttcttcccagctttccctcctggtccagcgggagatggcggtggggacggcgccggggttgcaatatgaacggcctgttgaaggatagagccatttccaccggaaatcgagggggcaacaccacaaaagataccactggacgagttcatcttggctgcattgtgtggaagagggggtagaatagaattgttctctagttctagcggaacgacaagtggcggagggttgtaagctgggtatttggaagtgatttcctggcggaagagatgatagtccagaggggaggcgtataagaatggtgtcctgcgtttggcatcatccttctcagagaaaacatcaggctctagtacttcctttgcgcgctttaaatcttcgataccgccaaagacgagaagcagcgacttccacaacaacagcaggatcctggtcagcggaatattggcagattcgtcccagcgcagtcgagcgataatttcaacaatagagaccaatagattgggattggagctggtcagtgcatcgcggattgagctgcactgagggtcgcgcgcctgttgcctgcgacctacttctacggcgaagtataagcttgtgaggaccaagttggcctcacgctccggggccgcaatatcgccagggttaattcgctcgtaatcaatgtcactagtgtcagatccgagtgctgagcgggtcttatcaaaaaggcgacacatgtactgtaccaatgcagtaacgcccgagcattcctcgagaagggaaacattctgttcgatgcactgaatctgcattgactttagcagtggcgtttcggctgctgactcgggatttagatcagaaggatagtcgggtgccactctcccaccgctaataccccatacaccagtgaccacatagcaaatggtttcaagggcctccaatcgcgcggagacttcagaaagcttcagatcctcgagcatccgagtaataaacgaacgacgtaagtctttagaggcctcaagccaaggcaccccgggcgtgtctcgctggcgtcgctggcaaaaggtaggccatttcttgttaaaagtccctttcatgcccatcaacatgacacgatcaaaggcgttatactggaaccactcgtcgagctcatcggggaaagattgtgcatcggcatattcaaaagcataggctggttgctcgatcttgggcatttcacccacaagcttccgcaactccgataagctcagagagctcgcaccccggtccgtggtctcctgaacgggagctggagggggcggctgcatcggaggaggtggagcagagccttcacgacgaagttcaggtcgtttcataaatttttcgggcgcagagaactccgtctcaggagcgggtgcggcttgcgaggcctgttcctggcggagcccctcagcgacctcctccaagagttggtcgtctgaaactggcgagatatcggtcccagtttggtcgacctcatccgccttgacaatatgatgctcctgcatagtggattcgggtggatctgaaggcgcgtccatcattggggacttgttgagttgttgtgttcctggcagaaagttgttcggtggatcgatcaccagggtaccaacgctccatacatcagtgaaaagagcgaaaagaaggaacgaaaattagacgaaactcatgtaaatggaccactacacattttgtaaagtcttcgcaatgcacgaggggtgtggctgcggtgttgatgcgggaggccagctgacacgtgaccggactacaaagccattgtgtacgagatttacgaaatagatagaaagagtcagaatataattgatatcaggcagttaaaatcaacaggcaggtgtccgctcgctactatggtagtatacgctaaaaggggctatcccttactccgacttcttcccactgaggccgagacgcttcaacctctgagactcccaccgttgccagccagcctcagccaagtcttcacttaagacgagatcacggattctgactaaccgggacacagtgctttccatggcccattcgatcaacccactgcttcggagcaggctggtgaccatgaaccagccgcaggcgcatacaaatccagcggcacagccagcaaggacttgtctcggggtgtggtagttgaggtagacgcgactggcagcgacacctgcagctccgatgcaaaggcctagcatgaccaggactcgtaataggacggcaacattggggtatgagctggcggaagcttggctgtgacggaagagaaggaagaaggtgaggtagacggagaagaaggtcatgaattgggcgtgtgaagatggcattccatatcccttgccgaacatttctgcgaattacacgtgttagttttggaaggtacccagacgacatcgccgacttacccttcggtcgctcttccttgatgaaacgtttgaggacaaagttcaaggcttcacagcccatctgccctacaaacatcaggataacttccacctcccttgttgaccagatcaaggttgcataggaaacgcatagtgcctgaggaatcagggctagccatgctgaggcaaaggacagtcggtcctcagggttctagaaacatagtcagtggcaagtcaacagagatatgatgacataactaacgtagtggacatgagtcagagacaacgacgccagcggagtgtctcccataatgaatcaaaagagtgaatggagggaagttcgaaagttccagagacccctaaattcgggagatttccatttcagggatatcccgatgccaagcctttttcccttatcggcgataagcagattgggcagcggggacttccagggcttttcgacttggcgaattatttttccttcatatcttcaggcatccgaggggatttgccattctttttggggtttttggtttcttcatatcttcatctcttcactcgtctcccttctagtcacttcactttcaaacaatgacgccgttgttctctatccaaaccccagactctctattgcatcatcttttagacccctcccgactttcagccgaacattggcccatagaaggaatactcggcacctcttcgtctttggttggtctgaatttttaccaggatctcagtcacaacgctgatttgaagggaatcttcctgcaggatataaacctcccttttgtgcccgatcgtccttagtgacagttcacttgagatcggtcatcattaccttcagatttttttacgacagtcatgagccagcgttgctgagagtttttgcaggagacaccattgtctccaacttgcgatccactagcgttataccggaggcaaatatataatcatccccacctgagaaatcttcacaagtgatcatactcggtttcatcccgccatgaccgaactcgactttccagaggatgagcgctcagtcgagctttcctcgatagctgccatctttccagagattcaaatcgatccgtcctctccgttcaaagccgttctcgatcttccagtcgcaccttcctccccgacctcaatatgttttcagcaaccgcttgatcctgcagctgccgccatcacccctccaacctcattggacgagtctaagggagaattagaccagccgcctattaaagacatccatcttctctcgcacctacctccgcttaacctcgagattgaattgccagagggttatccaaccgaaaagccgcctatcgtccatctaaaaacgatcccctcgtggctacctccctccgtcatagatcaattatccaacgattgcaaccgactttgggaggaatgcggaaaggatctagtcgtctttacctatattgaccatctccagcagctggcagaaactgctttcaatatccagaatccgtcgggagaaatatatttatcgcgggacttgaagatcggactactagactacaacaaaaatgccgagcgggaaaagtttgagcaggggactttcgaatgtggggtatgccttgaaccgaagaagggcaccatttgccatcgattacttcgctgctcccacgtattctgcattcaatgcttgcaggatttctacaattgctgcatcaccgagggtgatgttgacagtgtgaaatgcatggcgccggattgcgaatacaacaagagacctgtagctgtaccgggcgacggccagaccccgccccgcaagaagcgtgatcgtactctgggaccaagcgagctactccagattcctttggaaactgaaatggttcagcgatatgcattcctcaagaggaagaagaagattgaagccgataaaaccacagtctattgtccacgacaatggtgccagggagctgcacgttccaagcggcaccccaagccagaagatcctatgtcggatgacttggatagttctgacgaagaagatggatccgaggcccgcggcgaagtgaacgatggagagcttcctcctatggcggagcgtgtgtctatctgcgaagactgcaactacgcattctgctgcgtctgtaagaagggctggcatggtgaactggtacgctgtttcccacgccgcgacggcgagcccacggaggaagaaaaagcgaccgaagagtacttgcgtctgtacactaccccttgtccgacttgcaatgtgccctgccaaaagcaaatgggatgcaatcacatgcgctgcttccagtgtgacacacacttctgctacctttgctcggcctggctgagtgcagacaacccatacaaacatttcaacgacgagaaaggccaatgttacaatcgtctttgggatttggaaggtggtgatggcatcaaccccgacggggctgaagcacttcaccgcatcccagacgcactcctagacttcgatgatgacccacctgtggtagacattcaggaagaaacagacgaaagtgatgacgaccaccctgcatttgaatttgatgatgatgaagacgaccttcaccgacatcctcctcctcccgcacccgctccgccccaaattaaccgcggtggcggcagacctggtcaacgtgaccacgcagctgcccgcgctgctgcggctgaacgtcaggctcaagctcgcgcaatggccgaggtacgaaaccgaaatgcgagacgacaagccagacgccctgttcgctgggcggaagttcctccccaccgtctccctccacaggcaggtgatcctagacgtcctgtacagtgggcagaggttccagcagaaccattggcagacgaagacggccccatacgatgggaggctattgcaatccgaccaggtagagcgcaggcacatcctggtcttcagcgatttttggatctagtacaaaatgaccgtgaagacgaatgggatagtgatgagatggacgatgacttctagatcgaggatctatgtgcatgactcaacattcaatggcacataagaatcttggtctttccctgttcaaaaagcgtcttaatgacattgatgcatacaacgacttgatgttccttttcatttttttcttcacattttccccttcattttgattgcgtttttcatcaattcccccttcgtcttctggcacaccccgttgcgtttccctctttgctttttttttggattttcttattctctgcttcattttcatatactagctcttctctggccaagcgcaggaaatgcccatacatactcctctatacatacaacgtgcgttgcttgcgcttcgtctatttgatattctgcgtttatatgatatctccataattctatggttgtcgatcgcttgactccgtctttctgtagcgcgcatgggtatacaattcctatgttaataaacccatgcataccacaacgcggatccttcattataatcctccatcttcaactccgtgacagtcaatcccaacttgcaataggtttcacaaatcttctcccatacagcctcacctatactcttcgtgtaatcggaaccatccgagtcaggatccatacatgtgctcatagagctcgtcataagcacgagatcaaagttcgcagtcataaccctccaatcattattaatctcattcgtgaagagacgttgggccggtccctcaatattaagcggcgtgttaagaggctcagctccacccagacaaatcgcaataaacccggaatgccactcataacacttcaattgaacaagcaattcaaacaacgtgcccatacgaagaccctcatcttgccgcgctgccttttgttggtaccaagaaagacccatttgcccaatccccttgcgaaaccgtccgaccgtgaagactggcggttgttgcgtcagcatacggcgccagctcgcttcaggccggagatatatctccatcttagccgggcttttcgcgagatcgaattcagcgagtttgatgtcctctattctggcgcctacattgctgctattttgcaggtcttttgatggaaatgctgatttgaatgcttgtgccagcaatgggttgtagactcgtgtatctgtcccgctgttttcgctggctgggatgaagaatagggctttttgcagtgagcgtgatgtgcggattggatctgcccaggtgtgacagacacgttgggcggcgattagggtgcgcatgtccatttggtggaggattgagatcacgatctcgggcatcgcgagagccctggtctgggctgggtgttgggtgtgcatctatagtctgtgatgcttttgtaaaattgaaacttgaattccagttgtataatgagctgcgctggtgggggctcggggtttttgttgattgcttgtccgagtcagctgggctgagacccttccaaggttggaagcgcttgactacattgtacgcaggggcataggagccagggttactttcggatttaataatgcattgcggccttagtgcctgtatttcgcctgatgttggccttaaacctgaccgctttcaggccctacctttattcaggaatctatatgtattattttctcttaagagatatccataattgattagatcgctattatctctgagttcaggttcaaacagcccaagaatcatgcggtgtatgaatttgcatggcagaaatagcctcatattcatggggccagatgcgcgggtctccgtaattgtaattcaggtaacgtatttcactaccgagctgcacaccaccgagctgcgcagcccaaaacgccatagtaaatgcaacatattccacatttatatcttaacgaccacttttcaacttgctttcattacttgtcaataggtatcaataagcatttttttagcaatatatctcaatttcaaataaatcggaaagttgcatcattgcggtattgaaggttgcaacactgaactataggaaatatctatatcacaatcactattatatagagtgatcagatatcatatagagaataatgggctacaagataaagtttacattgaccaccgttgttgcaatatcatgttgtaatttatcgcttttactatggtgaattgggctgcgcagctcggtggtgaaatacgttaactaaatccgaaagtaaccctggcccctatgcccctgcgtatacattgggatctcgccgtttagagtcatctgtaattaattaatttatggactttgataggcaaattgaagcaaatttatctagaaaaacatacattccaaggggccttccaagtcccaagcttccagtgagggtagggtgaatgactaaaattctgcctggcaataaattccaataggagagttatgaacctgtggcatacttagtcgcccgtattcgttcattatactacgtgtatatgtaggtacaagtagacctttctgattggatggaagtttgaatagcgattctcgaagtcgtgagtcaggacctgcaagatcacgaagttgtcagggtggattgattttctagcaaagcaccggggaatgcattgggttgggatcgacggctgcgctttggctacatagtatatggggatattatcttccaaggttccaaagttgatatcgaagtgggacccgtggtcttggaaaagaaaacttagttttaggtgactgaacataagatttaagcttattttgagcggaaccaattaggcttatttcggttagagcctcaagtgaccgctgtacgaattgattacatattttttcatactatttatcgactaccagtattgaatttgaggtggaatactgaattagatactccgacgggtagaacatgcctcttgtaatcaggtttcacgaagcgtaacctaatttgatcatcagatcaacctctccagtcgtgccaaaactcatagctcatgactgtgagatcagagaatagcaaaagcaacctgtaatgtcgagaaggatggtaaccatgccaggtctcatgaggttggtagatttccgaggcataggcgtgggtttcaggaattgtaaggttcgggtcttcggagctagggataatatccgggccagagggactgaaagcccaggattcgggcgggtttgcgacataaggttcatcttcatctgggttgagtagacggtggttgaatttcaactgatccttggggttgacatcctggggaatacaagggacatccggtggtatctcaaatccaggcatgggacttgcagcaatacccataagaggtagtggtggacatccatcgtccctctcctgggtgatgaaagggagaagccagtctaggcgaaaagtgtggccaatttcttcctgccatgtaagagtgatgatggcaactccaccggcctgggaggcggcaataacgatcccaagttcagggaggtacttgaccaagtttaagcgatcacaggagtagaacggagaatgctctaccagcgaatcaagtggagaccgagaaaccgtccgcaatacatggtctaatggataaggattcagagtgatggtatttccagaaaaatggagaatagggaaaaaccgagggttggtcgctgagtaacaggttagcattctaatctaacaccgaagcacgtcgctcacttacgatggtgtacagagcctgtcaaaacatccacttcagcagcaggtacttcagcagcaaaatccgggccccattgctcattttcttcttcaaccaaattgttaataccacgtctcacgcgaatcgagtgacggcgcgaagccacctgctggtcttgtgatacttcagagctgacatcagtagtgtcaacagtatcgggaggagaagctatttcggaggcttgtagagtggtattgttatgctctgagctcaatagttgcggtcggaattcagtatgaacacagccagaagggaaaatatcgtcttctagaaatatgctcgaaaccgttgcatgttcctcagcagcgattttctgagaagcgaggacggatctggcttcgacataatcagccgcctccgtcacgtcgaaaaccacctgatcatccatcatggttcgctttgggtcacatccacaggcatgaaacttgaggaggtgctgttgaaccctgcgaggatgtaaaggcaaaacgaaccaccccttttgctctcgaccactctctaaacaatcgtaactggagatatcgacaggacttaagctgtcccagactctccatatggagacgttgttgaggatatcggtacttatcatccacagaccgttggggtccaattcaaagttggcaaacgacacgcatggaatgttgtcaaaatgacccctataggtgagccgcaggttgcgtgtgcgatgacggggcatggaccttttcagaccctgcatcaactctgcattgtgtattgacacccatgtgtttccagagcctcccaaatttgaggtctcagaggaattgggactgctaccatcattttcagacaccacatccatcaaggcaaaagcaaagactgtgatatcacccgtgttcgcgctgacggcgatcaaccgagaaaacttgtgggtagctaagccccaagcactcaaataaacatgttcagcgaagaagggctttatttcatgcgcatcaaatggtcggccgcctccatatttggcgctcctattgattgccgagaaaatagcctcaacattgtagccggtgacgtttccagaatctgtcgctaaaagcaaaacctcatcaacccccaaatcatcaacaatgatatgattgattgtatgaggcctagagcgatcgatgtatccagccgaatcgggttccttcatcaccgggtgaatgatcatctcaggttgggagccaaggagctggcgaggtccactgggaatccatacgtaaatgtcttcaacttgagctgtaaaaagcagatttcgacgctgcgagaaggccgccttgcaaaatcaaggtcagaactggggggggattatacgaaacagcaactagattagtaggtactcaccagattacacctccaagcagagacagttggcctaggcacatcactatagctcaatgataatcagtcacggtgattcaggtagtacaaacgtaaatacctactcaggaaactagcacaagtcagttcatagttctcacgtggggtaatttgaagacaaacatacgcgttcctcttctgcttcgatattcaatgcttgtacctggggccgatatcgtacgaattccctttccgttttagcacgcgtagagctggtgggaggaaaagacattgctgtaggcgaaggatgcttgcagagaagaatacttctttggatctgagcagcaagagtcgtgaatagtaagatatgcagcttgctctgtcattgccaattgtggagagaacaagccacaagagacagaaggctgggaactttgtaaacagatcatgattaagctggtcgcaaacacctccatggctgcggggaggtgcaatcattcgatgatggaatggctgaccgcccacgcacggaccaccattgagtgcgtacatacctagagcttcgagggcttaggctttctcctccgtataacacattctatcgcatgatggatttggttgctggtgtacgcaaagaaggcagccggtaagttcattcgctggtatcatccttttgtatgggttgaaggttgctaattttttgtctcagcggcggccgcaatgagttcaaatggtccgacgtccaaagttccgtccaccgcgagaactacttaggccactcggtgatggcaccagtcggcagatggcaacaaaaccgtgatcttggctggtacgccaagggtgatgaagaagaggaagaacgaatccgcaaagagcgagaggaacttcaacgtgtcaaggaagcggaagaagaagcaatggcgatcgctctgggcctcccggtgccccccaaagcatccgaaaacgccaacatggtccccttagggggcgctagtagtaccgatgtagtaccaagagaagaagcgatgccagatgtcggaacaacggaaaaggaccatcgctcgagtcaccgacacagacgtgagcgatcccgaagcccgcgacgtgaaaggcgacatgaccgggccgacgatgttgcacgtgagaaggaccggagacaccgccgtcatcacgacgaccgagagcgccctcaccgcagccatcgctacagatcccgctcacgatctcgcggccgagatcaccacagacggcgctcagtctcccgttctaggagtcgacccagccgcaaagacgaagaacatcagaaacgacgacggatggagcgcagctactcgccggctgagcgtcggcgacaccccgaacgcagacgagaccgagacgactatgatcgccgccattgagctacagaccagggatatgaattgatgcattagcttggcgttggagggatcgattcaaatgccggataaaccattgcgtaccactatcagaatgaccactatctaatctacgtgacgaacattttcacatcgagttcaatagcttacaactcgtcatgagtagtctttccgaatccggccaaatcaggcatggacatcatgttcaccaccatactagtccagccggtaaagtgctgtgttcgctggccattgcccgagtcagggttgtactgttcccaagcgaatccagtcctcttccactcgcggaagacattttcgaccaaattcttccgcaagtcagagtacatctctctcgcctgttcctggtgaggaccagaaaccgtcgcagtgtcctgtgaaggttctgtcagattcggcgggcaaataaatcaaaagatcgaagcacttacatagagattcttcaacaccaagtagttgatgttaatccagacaggacttctccaatagttttcgtcggtttcgtagaacttatccttcttgcttaagctgcggataccgtaatcactccacagctcctcgggatcaccgatcaagtccaacacagccttgagacgcgggctgtcaggacccaacataccagtcaggaaggggaagatggagatgtaacccttgtggcagacgtgcacactctcttcatattcatcaatggtcgcatcgcagaaggtttgctccttctcatcccagtgcaagtcatcgatgttacgagtgatagcgttctcgtaggaggcgaacttctcagcgtcttcctcctcaccaaggttctcagcaatgcgacgcatagcgcgagtcatcattcccatccaactgatcaaatcgacatgcagctcaccggggtgcggtggctgggctctggggtagtcatcgatgccagaagtgaggatgtgctgcactgaacgtccgcgccagcggtaaccttccttagtcgagaacgcttcacggtcatacgatttgatatcaccgcgctgagtatttctgtaccagttgtagtgcttcttcaggagcgggtagaatgagcgaaggtatgcttcagacagttccgggtgtcggacagtggcggaacgcaggctggcggtcgcatcttggttgtctagggatgcgaactcggtgctcttgtttttactggtcttgactttgtccataaatgcttccaaggccataaatagagtaggcgggtttgcgtaatgaggatattggaccgtaaactccgcaggtaccttgctgcgtgcctcttggccgagaatctgttcgcgggcaatccacccatcctcgtccattaagtggaaccagctcttgataatctcaagcctgtaaaagtcagtatcaggcaaaactagtgagtcaaacgaaagtgggtgtaaacgtacgcaagatcggtatcgtattcgatcacgggcatcaaatggaaaccttcgtcccaaaggaatcctctagggaagaaaggccgggagggaacgcaagtgaaaagctccttagggccttcgataacaggctgcgcggcagccctggcctcggcggtctcttcccagaagccttcattctcctcttcgtacgcagggtttgcggaccgatctacgacatcatcgccgtggaagaacccaatgccaccgatcaggttagataacattgccttggagaagctcgagtatttcggtgagtcaaatggcgcctgcggcggaagaagctcctcaaaggtttcagaaaatgaagccgaagcttcatcaatttctttagtaagggtttctgaagtcaaaggttcggaagcggatccggaggagaataggacatcgaactcgaatggaccgctgaaaaccttctggacaagctgagcgtttcccgggccaggtttgtgcttgatagtaaacagctgggccgggggcggaatgttctcttttccatactcttcaagggcttcgtcaacctctgccttcaattgagtgaagaagattcccttcgcttgccaaagttgctcctcagggaaagccacactagctacaatgctgcgatccaatggcttgtctgtggagctaggatgattgtagcgagggtgcgagttggtttccggtccagtggtgacatcgatagcgaaatcaccaagttctgcggagtatccttcgagcttgacattgccttccactccagtggattcagaggatgcagaatcggcctccaagcgaccgaatccctcgagagtggaataaaagataacggagatgggctggtcggggtctgcgccctccctaggcgtgcccttgactcggaatccccagctacctccgtgctggccaccgggtactttgatgaaatcgatgaccaagtccaaattgttcccagcgtcatgaatggtttcccgtccaccttttcggatatcgtactcatcccagccatacccagccattccttcattttgttcgcatgtgtgtctaaagtcttcggtagatgttagctttaattcaccaatgcaaccgggctgccaaggatcacatactttgttgagcaccagcataatcgtcaacctttccccagatcaaccccgccgaaagactcttcggaatgcgaggacgcaccccaaagtagagattcgacttgtaggggccccaaagcaaggactcgttgctggcacgtccggcctctcgaattaggacggacacatcattgggatcttcatttgcaacaatcccagtcgcatagagaagcgacgtcaataacactgaaatcccgaggttacgcattatgtagcctcattcaattgactgctgtcctccgcgcggcgttaagctataggtgtatgtatctccacttaccgcctactaaatacagactagtctcatatgcgtaccgcgtcacccatacccgcctttcctcgtcggctctagtgctcacgttgtctacaaactataaatgtcgtgctcatatcatagaaagggtgtactatatttttgcgatagacattgtgtgacaagtatctattcagatgaagtttcgtggatccaacgatccaatgtttgcgctcttcgccttgccatcaaatacaaactcactcatgagcttccctgtacccggcgcattctggataccccagcaggtatggccagctgcaacatacagtccctttacatcggtcaagccaattagtggcccaccgccagtttcacagttaggaagatagcaagcctggcgagcgcgaacctctccgtcgcgcagctcgtcagaaatgctacccacatgatctatgatttcctggcagcgcgtctggtcaacctggacatctgcagaagtctttggtaatgagaccgttctatctccgtcgccacatgcatagacggtgtcatcagggcgcgcgtagatctctggcgcagccacagttgggcgtgacttcttttcggggttgaagtcggccgggatttcgatgtttgtaaacaggcagtatgcgctgactggtttctttggctggatcaccacgctgtgggcccgcatgcctgagatggggacctctgggaggatagtcttcgtccagggaccagcagcaacgagcacatcggttgcggtgatggtttttgtttcacctgatgtcttatcagtgtatgtcactgactgcacagaacccttggaccgatcaatatctgtaacctgtccaagaatgatacttgcgccctcgtcctgggcgagctttgcaatagaggtagtgaagaagtatgggtgcacttgagcagtttcgcccggtccactcatattttcataggaccgcagaagatccggctcaatccaatccaagtcctgggggattttggcagacttcagcttcgacatagccgctgcactgcgtttcagcagagattccctatctccacccccggatttccctgcagtgtgctcggcaagagcacgacctctcacgacgagttggccacaattgacctctctgtatccccatcgattgataccatcgtgctcttttgcaagttcggcatgcagtttgtagctgagaccaacgatgttgcttgggaaagcccattgcgccagcatgccacccgctttgcctgatgcagcgccggcgatttcacaggcctcaatgagtgtaatcttgtgacgggtagggtcgtatgacgggtgtcttgtgaggtaatatgcagagcagcatccaatgatgccaccacctgtgaggattgtggttagcaagttgcgaataaacatgcggggtaggaaagtcgcgcaaacaatatgttcttaccaacaataacaatctcacgccgatctcctgttgctgacatcttaaattttggcgttaccttgggtgctaatgatcgcaaagaagccactgtgtagagggttagttgtagttgacaagtttgaacagcaggtgtgctcatatatagagaatgcctacgtcactggggatctagtctgtccagtcatatgtcgcatccgcaatcaagtcgtgaccggtttttatctacagatttggctatgaatcattgaatttttttggttcactaatatttgaagtaatgaaattggtagtaaatccacaaaggtttgggccatagaatgggaaggaaaaatatcaagccagcataaaaagtactccgcaaatgcatatcgtgtcgaaagaaggcagaaaatgtccagtgaatacaaagaagtgtgagaccgtaggaataggaaggatttaaaggttcatcgcgagggactgagaggccggttgaaaccaccctggcggttcatgtactgtcggtactcgatcttcttctccttccgcacaccatagatgtcgttaccggggattttggtgttctttgtagtccggaaccggctgaaacccatggtctttcgcatttgtgcttccatttcgtcttcgcccgcatcttcattgaagtccacgtccatcgcatcctcgtggcgatctggtcctggttgtgcgccattcgccttctgcccaacatctcgcgatcgagggtctttgcggtcgccatggcggtcactcttagggcctcgagggggtgaccgggcctttgtgccattgcgatgcggcgagcgggagcgcgaacgttcgcggaacttgacgttcttgggtgcattgcctgatatttatatgttagcatggcacgagtacttcaataattcaaatctttcaccaaccgcgtctatcctggttgcgctcccggctagtgctcctctttcggttctgggccccacgcccatctctgtcccggtcgcggcgatctcgagaccagcttctatctcgccttccatccttgcgttcttgtgagcgagagcgataccggccgtcgcgtcggtcatctcgtggagctggtgagcgtttgcggtcgcgatctgactcttgctctggtgcatgaggccgtttatcattcgaatcccacatagttgagctgtcgactcggcgagcacgttttgcaggtggctccgccattgttaaaaaggtctggtctagtctgggcgttgccccgtacaccttgggtgtttgaggcagctggggccagatgaggatggctttactcaaatttcaagagcttgagtaatgataataggtttaaggagccctaaagcgaatgcttgtagggatagaaatgtagagggtatcaagttgtcgcaatggatgtcggcctgaatctctcaggaccagagagaagtttattccggctccgggaagagacctgtcgtgcattttgtgacatggcagattgaccgatctatagccgtgacaaacaaattgtacggttgggattcaattttaaaactgctttgatcagtgtcatcaatagcctgatgcatcgcttgaataatcaaatgtgatatatctaaatgaacccaatgaaaccctatatgtacgagaaggagtatatgacttacgactgcactatggcactatctaagtatcttgcgcgatatatcgtaggtttatatggtatctcactacctatttcaccctattaatctacatttctcacctaaattcttcgtataattgataaaagcatttaaaaaaacatccaaaaagacgtccaaaaagagtactacaaaactaatattcttgttaatttaaattgctctatagggatagagcacgtataggtatagaaagtgttaagaatacagtaactagttagagaacaatttgaagtaatttgacatattccattgtgtcagattgaatcaaactgaaggtagcaatgcaaagcctcatagttccagatataaagtgatcgaagtggcacagcgaaaagaaaaatatgcaccaagttagattcagaaatcgatttctgctatattgataccaagtaggcccaaaaaatgtgttagatcggtagatcatggattgtttgaatcgctgattgagacaggcgatgttgtaaaccgtaggctgtccactgacgcactttcaaaacatgcctgagcactggatctcagggcactagccttgtctttgccttgtttgtcaggtgagctatgtatcatagttgcacctaacgacgatatagcatataagcaagtagattgcaaatgcagatgccaatttgaaaaattaggcatcaaaagggatgaagccatcgaagcagatgtggaaaaaggtgattctgactgtccgccacttttggagttggtttgaggagaacacctggcacttcatgcttgatcccactggactactattttgaccagagagataattgtcacgtaggagagcactttgaggcctgtcaggaacaatcaaataaatctgctgtatttattaggtccagctcctgtagaaaactcgaatggtagagaagtcctgtcgtctcaatactttcctccatatgtagctttattgaccaagcataaattgagaggcgcagccaattatccggtctcagggaaagtaactggagtattggagaaaggcctcatcaatttctggtgttttctcaccgatgcggctcatctccgcatagttgaagttaccattcatccaattcgcagactctgaaaccaattcagtggagggctgttcaattgagttgccacttctcgcaatggcggatattgatgattcctcattggtagagcttgaaaccaaggggctgggttggagtttgagatgaacggtgatagggtctaccatggatggcagagtttgccctattttggtaagtaacaggggaagaagccttcgacggcccccgggaaggtcgtgtatgagagtaaagaaatgcttgagataatcctgcgggccaagcttgaagcccgaagaacgtagtctagccgttgagaggcatgccatgacatcaatcaaggtgcacgccacctcaaatattttttcaatctacagtatgttagaaaatgcttggtatgtttaaaggtaagccatacaagaccaattccgtgagtttccatactctgcctggataatttccatgtcgcaaagcagagatcttcagcaattaggagggggtagcgaaaatccatgcattcatgactaggctttgtcgaaagaaacccagcagttgtagatagttgccatatcatgatacgcagccactgctgagacacacgcaagtctgccatgagtatatcaggcagatcaaggtctgccgggactgcactttggataagctcctcaaggcgaaccagcgactcaatcgagcatgtggcattcgttccattccactggctcagaaaactttcgtcaaatgggcggtagaggtttaccagacaccgaaagccaatggctgatgcattttctagtacattgtcttccaattgagttggaagtgggtcgtcttctaatcgagggctttcgggagtgacctgtagcgtaataggtctatgtcggcgaatagcgtgagctctgtcaccgtgttagcgaattactaatgaataggcgaagaaaatacctctcggacacgactaggagccaaaacaatttgcctgccaaggaagggtcatcgtcatccacctgcgccgatgatgcttgactttccagtgcgctagctgtataaagtgtcgtcgattcgcggagaaaataatatgcatgccgttggtttccaagtccaatatgacatccatacagaaggaaagcgatgataatgctttgccgtataggatccgtgaatggatcgatatgctttcgagcttcagtggcttcctcaatcagggaatttcggtagtcttcggtacaaaaaacccgagagaattccaaagatgaatgctccacggcaaatccggtttgagtgaccacaaaagcgcagaaagcagtgactagacaataagcatggaggcatgtatcggcaaggtccacccgtttctgaaagctgccgggttgtaaaacgggcactgttcctctcattcgcgagaaaaaataccccgagcaggcgttgacaagctccccgctcacaaggcccggggttttcgcgaactgacatcttcccgaggtttgtagtgactggggagttggtatagtatccccgagccctagagccattgatggcggagaaatattcgcatcctgtgccagcgcctgttcaatttggtttgctctgagttcattgagaatattggctgtttggccctgtctccccttcttctgtcgttgcgaggaggttcggcagaccaggccagcagctcgacactgctcacaaggttttgggaaaatacatttgactttacgtcggcgacatgcatcacatgcttgcttggccggtgggtctggcatctgggaattcaggtacaaatataccgagaggaactagcagaacgcaaagatccggggttgcggggggaagtcggggggaagtcgggaagaaatgggaattgtggccttgtttgtcaggccccaacatccggtagactcctaattcattctcttccctgtatccattgtgacttaattcgtagtactagtggagactatgtttctattcacattgtcattttgtgttcagaaaagaagaagccaattctaaaggcctagggaaatcccctcaggggtttcctgctgagctacaagccgtggaatgctgagaaattagcgacatcggggaatattataaccaggcgtatgctacgcagaatattatcctaggaaagcaagatttcaacaaacatttatagaaacatattgctggttggtattctacgggatatatctcagatataaacacgtccttcgaagggcttcagggtttccagcaatgaatcggagtagttgcccactagcaacttcatacccgcagtactcgcagcctgtgtgaatggctgagatctattagtaaagttcagaatgaccaatgcccgtttatcttgtctcgacttgacaaaacaaaacgtctcttgattctcgtagtcaagtacttcaaatgcaccgtggatgaataactcccggtgctctttcctcagacgtagaacgtttttccagaaagacaacacactagatgcatcactctcctgtctcttcacattgatctcaccatagagatcatgagctcgcatccacggtttcccggtagtgaaaccagcatgttccgagccatcccactgcatcggcagcctggaatgatcgcgagccaggattcgaagaccatccatgatctgctccttgcgagtaggatcggctccactctcactgcgctgctctgcttcccggtaataccccaatccttcaatgtccttgtattcctcaatgggccactcgcgtggtgcattgatcatgccaatctcctgtccctgatatatgaacagagtgccagtcatagtaatcatcatcagagccagcattttggcagagatctcccggaactcgggtgaatccgatccaaatcgagagacagaacgcccgttgtcatgattttcacagaaagcggtggtccagccatccgttccctcaataaaagactgccacttctgcacaatggatttcatctttgtcaacttccacggcgtaaagatgtacttctcctctagggtgggtcccatgccaatatggccgatgtccaagtggaagaccatactaagttctttagccgatgctcccacatattcgatgacgttcttgggatcaggtgtattggctagttcgcccacagtcatgacatccccgtacggagcaaatgactcttcatacatttcgcgcaggaactcgtgaatccgggggccgttgcaccacattccgatggcgggttggatgtaacttttcgggtctgtgatgggggcatctggaaagtttgtatgcttgctgtacttgttcactgtgtccactcggaaaccgtcgacacctttgtctagccagaatcggactgcgctgttgtagatagcctcacgcgtggctttgttattccagttgagatcaggttgttctttggcgtatagatgcagatagtattcttgcgttttctcgtcccaggtccctacatgaaagcatcgtgagttcaagtatactgattattgccaaatatttcaactcacatgtacttcccgcaaaataaccgcgataattgctcggaggcatccgatttcctgcctcatcatatcgaggagggcgccaaaagtaccaatcgcgtttatcattgtccttgctgctccgactttcctggaaccaagcatgctgatcactggtatggttgacgacaagatctagaatcaatttcatgcctcgcgagtgacacgcttccacaagattctccacatcttgtacggttccataagcagggagaacattctcatagtcggagatatcatagcccatatcgtgcatgggtgagtcgtacatcggcgatagccaaacgacatcaacccctagcgactgaaggtaatcgacctttttgacaacacctgggatatccccccagccatccccgttggtgtcatagaaggaagccgggtataccttcgaatcgaggacacaaaagtcaatactgtgtcttgaggaataccttcatgttctcgcaactaacctgatagacagtggcttctttccaccagttatttgtccccgtaggaacaaccgtatcctgtgtcgcatgtggtgacattgtggcttgacacctttattttccaccaggacacccctcttataccttttcatcataactcggcatcaattcggcctgggcaaacgtgggggtagaccctgcataccgccaagcctccggatggatgctgcgcctccgactaacaaccgacttgccgccgacaggctccgtcctggcacgctgattcgtcacatctagacctccacactccggcttccccagtttttcgaatttttggaagcgagtgacagcccatatgcattttccccggatacgcgatggacgtggactaagtcatgcgtgtatcttggacttgagatcttttgtataaatgacgcatcgccccatggtttgtcagtcctgataatgtctgaagtattgggatagtatcagctttcgattctgattaggccttgacaagaaactattgttcgaatcttcgaaatcgcaacacaagttccaatggtgtccatggacgacgaatccgcgagcatggacggcaaagtctcccctgtccttgcagaaggcagactagcatccaggaaggagcagtccatgactctctggcaggctctgcggctatacccaaaagccgttggctggtcagtcctcctttcgtccactctgatcatggaagggtacgatctcgcattgttgagctcaatgtacgcatcacccgcgttcaaccagaagttcggagaacagactgcctcggggaaatgggctgttccggcatcttggcaatccggcctttctaatggggcacgctgtggtgaagtcattgggcttctgatcaatggtctggtctctgagcgcctgggatatcgaaagaccatggtctgtgccttgaccaccatcacagcagtcatttttctgtttttcttcgcagtcaatattcagatgttgctggccgccgagattctcgcgggtatcccttggggtatcttccagactttgccagccgcatacgcctccgaggtttgtccggtagtcctgcgaccttatctgaccactttcatcaatatgtgttgggtatttgggcagttcgtggctattggcgtcaaccgcggttctatttctcgcgatgatcaatgggcctggcgcattcctttcggtgtgcaatgggtgtggccaatcccaatcattatcggctgtcttttcgcacctgaatccccttggtggcatgtgcgtcggggtaatgtgcaaggagcccgacgagcgttgcagcggttgacatcgtccaatgaccccaactttgaccccgaagagacgattgctatgattcaacacaccaatgagttggagaaatcactttccagtgggaccacatattgggattgcttcaagggaacaaatcttcgacggactgaggtagtttgtcttgtctggttagtgcagaccctatgtggccagaatttgatgggttatttcgcctatttctgtgtccaagcaggactgcctaccgttcaatctttcaatctatccctgggacaatacggcctcggcgttttaggcacaattggatcgtggttcctaatgtcctacgcgggccgacgaactatccacatctccggtctcgccagtcttttcgtccttctggtcatcacgggatctctttcttttgcaccgggagacaacaacgcagctaaatgggcaatcggcgtgatgctaatcattttcacattctgttatgacatcagcgtcggccctgtcacatactctctagtctcagaactatcttccactcgtctcaaagcaaagacgatcgtcctcgcccggtgtctatacaatatcagtaacattgtcgtcaatgtcctgaccaactatcagcttaactccacagcctggaactggggtgctcggtgtgcctatttctgggctggtacgtgtctagcctccctggtctgggcattcttccggctccccgagccaaaaggacgcacatatgaggagttggatttgctcttcgagcgcggagttccggcgaggaaattcgcgaccaccgttgttgatccatatgaaggagaggcgacagaggtccatgaggctcatgcggataaagattgaaagtatagcgatgtatccagtcccccgggtaatgccagatatgtaatatatagttagggtgttgttagtatagttattggaactaccaaaaatatcacaattggcttttttcgttcttccatctcacatcgtattaaatgtcaccactgaaaaaagaccgcaagtcccacattatccattacactacataatcggaaactatattagaccaataagctacgccataaacctgagtcagtctgactatcggatttctcatttatgcttacacatattgaagttactcgattcatgctctgagtccacgttcttccatgagctccaatcggtactctttagctttctccatagtcataaggggctccaggtgactttgaacgatatactgtagctccacttgtagctttgccaaagcctgattcacagcacgaaatttctcttgttgaggttcaaagctgggaagaatagaagaacgggtatttatttcctaatctactagggtcggtttcctattgtcaattgcatttacaaggcacaaggaaagataggacaggatgggtaagtgcgctcaattgatgtccgagttgacaaataaggaagtagagaccggcgtaacccgtctgaggtgattcaccacctttctttccccatgataactcccttcatcaccgatacgctaacattgtctgtctattccgtttgttcacattgttttcgaagcaccttctgtctgccccacagaaatggctagcccgcgggccggctcgtggagcctcaactttaaatcccaccacgaaattttcgcagcacaaccccacttcctatgtggtcgtcaacctacgtctccagaaagcaattagacgagaagagtatttaatatcaagaaaagatggcccctatcaatctttcacacaggcgaacgcacaacttactcttgatttcgaaactcttgagcttgcgtgacactgcatcgcccctcacgcttgtcttagattctttggagcaaccggctacgccactcctgaaagaatatatcagacgtgcaaaggtatattggctgaaaattataccactagcgacatctggctcactaggtacggggtggacagccatgctgactagttcgacagctatccaaagtccatgtcacactcgtcgcttttgaaaccctgaagcaaccggatggagtcgatgcttttgtatcaacacgccgcaagagccctgccgatatagttaaagaagtgagcgcagtttatcagcctgttgcagcctccaactcctcacgcagtaagcattgtggatttaaccccgctagtggacgtatacttactgcccgagtagggcgtcttatcctcattgactctattaacccccttctgaactcaaaaagagtcgaccctggatttgatttaccctccttccttggctcgattattgctcccacttcgccatcggccaaggttgatgtgtcactcgtgatgacacatcatcaagatgtccccgaacttccacagcaaagtccctactcaccatctcctatttctgtgttgacatacctcgctacgagcatcatcacacttcattcgttctcgcacgttctagcacagaaggctgctcgcgaccgcagtctggctcctccagtcttcgggcttgaggaagagcaagaaggcattctcctcggccgattggacagattggctggtactggccaagccgagggaattgttattgaactggagcacaggcggaagagtggccgtggtgtactggaatggtaccttctcccgcctgcctcacggtattcgccacagcatccgaaagagatcgtgacgttgcttgacgataatgttctgtacaatcctcctatggagcgagatccaagcgcgggtgatgaggaaccaacgtcgacctttgagctgggtctcaccgaccgacagaggcgcgaaagagaaggtgttgtgttgccgtacttcgacgcacagcataacgatggcccaggcgaaggaggtcggattctttacgacatgggagaggaagacgatttcgatgaagaagaggatgagatttagacatcatcaaatacgatacatgttcaagcaattctctgtgttctagaatcggcggattgtaacccgcaatcaccgaggtattaactatgcgtacattcatacagcgaggcctatgagcatggccacggagagcaaggaatcagaagaatcgccagaaaagaaggatgcaaatgacaagcccgacgccagcgaaaggtccatactgtgagatggttagccaagatcgctcaggggaaatctgacgcaaagtatagacccacctgcttcagcaacaattcccagttgatgcgtacagccgcctttctgtattttttgctatcctcgcggagtcgccccgacagttcacccatccgctccaaactatcgcctcgatacaagaggtcctcgatgttctttgtcatcaccttggtgacatcacggagctcatcgttcagcttgtcaagattctgagacgcgcgactgtcttggtacaatttctttgtgcgctggataaaggtatcaaactcgacaaaggcatagggacggaggtttggtgagaggtactgtgaggaggtataggtagtcgtgaattcggaggccagatcagcgagataggtaaatgcgagtttgcgggggtaggacttgtcgcaaatgcatagaaagcatatatcgtcctgaattgtgtagctgaaaggcatgtgagagattgtccattggcaatgtttgttgattgctggctgcgacttactgtagactgtattggccagactcaatactggcttggggtgcggagttgcggttcaatcgccgaaatatcattttagcctgactcttaatctcagagagctccgattcagcctacggatattgtaagctccagatcagcttaaataatcgttgtcacgtacctgctcgtcgtcgaccgaggctgccagcataaggcctgtttcactttgacatcagcactacgcatcctcccaacctcgcagagagttcctcaccgtcgagccttgcaatctgcgttgacctcaccatcctgaaagcgttgctcttttgttctgaaggacagcgctttcccctttgttttgctgtgagaatggctccgaggaagagcgacgcaaaggcggtaggaaggtcccgtgcggcagaaccacggtgagcatttgcttatcactctcctttccactgacgtcttataataatgccatagtactgctagttctgccgatatagcagaacagttaggtctcgtcatgtcgaccccaacatctgaagcgggctcacaagctaggaccccaagaagacctgctgctagagggaaatggagcgaggagcagctattgacgagcgataagtccctgcttattgatatggatctagtggtatgagccaatcctttacaaatgcgataccagattatctaagctaacgataggctaaaaatttctagaaactgctggcgcgacctgaagcatggaattgccttgaggaaagtgaaaagcgcgaaatcctctctctacttcccccagatgttcatccggaggcagaagctatatcggatgaccctaacgcaaagatcaaacccattcccgactcttttctccgctattcaaacaactggcgcgacggcattcgacagttccagctcgatctccaacacggccgttacgacccccaatggctgcgggaggcgcaggaagccaaacaggagcgcgaagacggcgactttgacgacttcaaagagcgggaatatgaagagttctggggccagaagcaaaaagtcaactggtatgcgatggctggagaaagtgcgagtgtgaggttgggaactcttatagatgaaggtgttatacagccgggcgatatctggaaattctaccatattttcggtaggggctctggcagaattatcatcgaaaaggaagtcatggtatgtatagatctatccactccgtatactgctctgccatttactaactactacaggtccttgactgtgttgggccaagattgacttttgcgattccacccggtgaacgagtctttcttcgaagcaatttcgataaggcggggtcattttcgataccagagaagggaaaagaagatatgaaagtcgacatcgacacacagctacagccatcgcaggccactcacgcaacttccgatggcgaggagataaaggtcgacaccggtaaagcgccacatgaggtctttacatcctccactgagataaatagcgataccgataccgctaccggcacacagccagtcatttcaccttcaaataacgaagagagccaacaagataccccattcagcgttgttattttcagccctggtggtacgcgaaatcgaaaacccaagcgcacgattcctgagccagaacctcaacccccagtgaaaaagagaggacgaccacgtaaaacccagccaaagcaatccgaaccgccgtcccaaaaagtcgaggttccccaggaaatagaagtgtcccaacgcgatgagcagaataccacggattctttttctgtgatgagaatcttgactgcaaaaatcgcagaaaataacagagctgcagcagaatcctccccccaaaagccctcgtgggcagaatcccccttttcggtactttcttccacctctgagccctcagagctccttggaccacatttatctacacacattgaggcacccgctgaggctgagcgggatgaaattaataaacccccaaataccgaacaacagaaagatccagtcccaattccgcctccaactactgatagtgagccggacgagatcatcgttcccaatatcccctcgccaggagcactcgtcttgaagattctacaaatcgatggccgcaagccgaccagccgtacagggaatgcctggaagtcactccgctgctaccgaaacaaccaggacatgggaagcctctttgatgtgcgagaggcatggttccttcaacatggacaacctcggtagctaccttccacttctaaccttccacttctaacatggaaatatcgatacaccagactcgcttacattattacccttgatatcacccatggttgcgaggattaggatgaaaaatgttcggtacatgaccaagttaggtagcttacaatgaacaaatgaacctcaagatgtcggaatacaggaaggatactggtaattttcatacttgatacatatggatcatgtgatataaccaggtgtttgtcttgtttcgacttgtcgatggtcctttctaccaacctatgctttgcaggcaataccttgcaggggactatatgagagctggcaagtccatagtcacctgaaagataatccaagtattgagtaagccttgctgaacaagagaagaagaagtgtcaccctttcctaaagaattatttctgctaactaaacaggactctcaaaaaagattataattacacatgatgcttcacaaaatgaaaggcgccataatagccaacgccatccatgaatcccagctcgccgacaatgagccggcaataccggaggcagtttctggtgttgctgccgcgagagtcgcgttatctgtggatgattccgtcgccgatggggagtcggatgattgagacggttcagatgattcagacgcagtatttgatgcatctcctgggctagacgacgaagtcacaatattggtgcttgaggcagctgtaatggtcggctccgtgctggaaggctccgacgtgctgcttggctccgacgtgctacttgactccgatgtgctggaaggctccaagatacttgtagagatagaagtaatcgtaggctccgaagcactctcagtagtgggagcttccgcagtctcagttggaaacgtaagggaaggggggatcgtcatagttggaataggcgcgggaatgaaattggttgctcgttgacaaaagttgccgccaagtgtagggcagttatatccaatattacagcagcctccatcggcacaattgggaccgccattacagccagttgcgcacctaggtttgcctgatataaatgtgcaagcggagccagaagggcaacatcccccagtcccatctctgcacagtgtttctgttgcttcggggcatgtttgctcctgtcgaggaatgagagctccggtgacgatcgcggcagcttgtatcctccactcggcggcgttggcaaggtggcagcctagggctacggccaagatagtctgccaagcgtgcatggcgggaggattggggggtttgcttgagataaagaaactaggaactcaagactaacgtgggacttcgcgtcctaatgaaagcgtagaaggaggtagatttgatcctacccggatccgaggaaatcgaccccagtcttatactagtctattccgtgcccaaaatgtccctgaaaatgttatctgagtcgtactccgtatgcctccttcatgcttgtgggcaggagctcgtattcaaccccgctctctcgttacttgcaacccgatctcgtattcatatacggagtatgttaatctagcctatatttggcctacttcttcgtattccatgaggctcaagcggcctgtcacccggggaaccaaatgggggtggctgatttgggtatctctgcccatagccagcaagtctgggtttgtaacaggcgaactcaccagtccataattggaaggtgaaaaatggtggccaagagaaatcaatatacggagtgtgtggagtagagcaatgaatcacggatttagggaaactgtgcagagtatctggaaaatatatctgaaatgtatgatggagggtggctaatatatgtctccttatgaactatacctgactaggagtatcacctatttaggaaagagtgatttagccttggacgactcaaatttatctgccaagcccctagcaactcttcctacttttgcagaacccctcctcgctttgcttgactgaactatgggacggtatggtaggattggtgagcattgaacagcattggtcagagtcgactcttaattttagagtaatataagctggcagcgaaataactatcaaactcccgagctcattggttaaccgaaagagaaatataatattatccactaaggcccgtcatttgatccagatatagcgggcataggatctgagtccgtggtaacatcaacagcaaaactagcctgtataaagtcctctaactcttcactcacagtcttgagcttctccttgacactcgcaacaccttcttgtccaacaatatgccgcgaaggagggttttcatggccaccaattgatgtaatggcatatactgtttcagagaccagcacttcaagatgtgcggagcttaatggtgggtgcatggagacaacttctggagcggagaatgggccattttcaatggagctaactcgggcgttctcatcgtttgttggacttggtgtgactggactctcagatgagacagaagcaccgggaagttgggggacaaggtggtttaagattccacggaagagaggcgcttggttgctggcgggtgagtaggcggggaagattggagggacactggttactaggttggtgaggatgccaatttcgatgctgcattggaagatggtgagtttgatgttaaacggggcaatttcgtaagccagactctgtaaaatagattaggttctgcgctaaggaccactccagagatactcacatcacagaatccttcaagggcccaacccgctgcgcagtacattcctagtccgggtgtaccgatatgcgccgctgtatatcgttagaccaatattcaagcaagagacagtatatatttcttactgatccctgatattatcatcacatgcccagcgcgctctttcctcatatgggggagcgcagctttgatgatattgaggggaccgaaatagttaacctcgaattgatcgcgtacaagattcatggtttgagttgaagcagaaagttcctcaactgttccaatcagggcttggggtaggtcagtatactgtttgagggtatcttcagaaatgtagggtcaccttgacttgtacagcatagaagtatgtctactcttccaaatgtaatgactgcatctgccacgactgcctggcactctcccatcattctgtgccaaaagactgtcagcaattaagatcagaattcataatcgagatgtctgccttaatgatcgcaccggatatctagcggaactgtcttcatgcgctgtgcccagccatcgtgttgccccacctcatcgagaaaagcatcaaattcatcccggcgacgttcatcccgttccaaagctgtatgtgctaatccaagaaacgcatagtctccatgcgcgaggacctgccgcgcgactgagaggccaatgggtgaatcccccgcggtgatcagccatactcgaggctcattatgcgacgggaattgcacgcgggcatcaaaggggaggttattttccatgagggtcaacgccaacagtcgaacgcactatccatcacgcgattgcaatttcaaagctgcttaatagcaaagtataagaatggaagatgcccgaaggtcggaagacaaatgccaagaccgagcaagttcccgggcctcgatctaatcgcgtgctaatcgcccacgttagctggccttttggcttcttcttttcttttcctcatccatcatgtcggaacaaaggccacgcagacaggaggagtcatccggtgtatgtgtcgctgattcaatgttgttgtgttcaatttactgactccctttagtcgggcttcaagggggcccttcagggtcttggaatcttcttgttggtccaatttgccatcagccagtacatgggaaacaaggacaagacagactctcccagcttgaattctgatggcatccctgcatttgccgatcgccccgatcccagcgaagtcgccgaacacagtgctcttcctgagaccatcgccccaatctggccctcctccagcgctgtcgatctcagcatttatgtaaccccgtctatcattgtgcccaacttcaagtcaccggacagtattcttgtggtagacgagaagaacttcacaattggaaactacagtgacactcgcgaaatcgacaccaccatcaaggtcccaaagcaggtccagcagaatggaactctctgggctcacttctttttggctcgtaccggatacccgctagacccaaccgctaagaactacaacaccgctgatgcagttcacttcatccgacctctgaaccagtacctccccaagaagaaggtcaagaagctgaagaaccttctctcgggccccgaggatgatcatgaccaggaggaagataacaccccggatatttcaaccatgtcatactatcaccccaacttcaccctgtccctgatcccagactccggagttcagaagttggcccagatgaaccccgcagctcgccagtatgtgcagctcgagcggactggtgcccgcgatgctagtggaaagaatggatggtactaccctatcgctttcttcaacaccttctggcaactgaagacccatatgaccgagttgaactctaccgtcgagaccgtgccgttgcatattactctcaacaacatggcgaactggaagttcaacatcatcagcagtgttgatgaaggctcgaaacaaagttcccgccaggctgcttatggcaagcctgctcctggtggtggagatggaactgagtgggagatggtaaaggaggttctcttggatacgaacatttggctcctctgcaccacgggtgtggtcactatcttccatatgttgtttgagactttggccttcaagaacgatattgtaagtgatatctccctatcaaaacgtgtggtatgtagcgtcgctaacattgtcactttctaggcccactggcgtaagaagaaggacattgttggcacttcagttcgcacaatcttggcaaacgtcttcatgcaggctgtcatcttcctctacctcatggacaacagtgaaaacacctcttggatgatcatgggcagtcaaggatttggtatacttctggaattctggaagattaccaagaccgtcgacgttcgcttgcgcccaccgccagccagctcttggttgtcgttcttgccctatgtgattgtcttcgaggacaagcacaagcttagcgagaccgaggagaagactaaggagtacgatgaaattgcgttccagtacttgtatatcttggctgttcccctcctgctcgcatacgccgcgtacagcctagtctacaatacccacaagtcttggtactcttacgttatccagacactggtgggcagcgtctacgcctacggcttcctcatgatggtccccagtctctatatcaactaccggttgaagtctgttgcccacatgcccggcaaggccttgacctacaagttcctgaacaccttcatcgacgatctcttcgccttcaccgtcaagatgccctggctccatcgcctggctactctccgcgacgacgttattttcttcgtctggctctaccaaggctggaagtacaaggttgactacaagcgcgtcaacgaattcggccagggaggtgacagtgacgaggaggaggagcctactcctgctgttgagggtgacaagaaggaggagcctactgatgctgttgaaggtgacaagaaggaggaagtggctacccaatcctcttccaagacaacttctaagtcgtctactcgcaagaggaaatgaactgctcagatgcaggtcttttcggcccatagaccgatgaaccatggatcaacgcctttgcataattagtaaatcactcgatttcactacttttggcatgatgctggtgagcattggatcataattattacaatgtcgtagcaagcaatgtttaattccgatccttctaattgaggattcctctagaaaatcactatagagttccggtctttattcatccagcaccatagaagtacaagagaaaagaaactaacaattatgatatgatcaaataatagacgaaggtcgaagtcgttgttgataattacccgattaggcttagggcaattttcgcatctccgcgcccgcttgttcttctatgcaactgccgttggatacatctaaaacattcattgctttgattctattagtttcaagactattgccaggaattgcacacaaccaaccagattgttgtttttcgacgcgccccaattgaggacgaagcatcgcgcgactacgcgctaataccaccatcccaaagcaaagtacattctgtcattctcgacgacacaccaattgtggcaattttacaatagaattcatgtagatggatgtcgacataggtcagttctgtttgtatcctttcagttgaaccacgctaacaattatccaggaagcaaccggccaaacggcctactcgatgcggtcgagcacttggaagctggtatggacaaagcctcttgagacggaaaaacatgttactaatgcaatctggtagttgcatttgtgccccctaagcagagatacacagatgccagtctactagccaaaaccatcgcttcaagcgcgtatgagagcggcattccgcaacccgtgctggcccgtctcctgaagattctgaccacgaagaataacctagaccagggcactgctacaacgctgatcaaaaacctgtacccccaggagaggatcgcgtctaagaatgtcactcaagtggtctgctgccttgggcccagcaagaacaaaccgagcctcgccacacaggctttgctattgcgctggctaattcttgcgtatgaccttttcgaagataggacgcatctcgccaagctttatgctgtacttttcaattatttggacatgattagtttgcggaaaccgctgtgtcaccttctctcactcatcacaagacgaaagcacgtcaagccattccgcattcaagccttgatggagttgatacatactgctggtggtgaagataaagagcttatcagccttctgaggattttcaagaattattaccccgagatcattctcggtgagttcggaggatcgagaaggaatgccctcttcttcaaacacccagacccggagtggtcaagccatgtgaaggtgctgcaagatcagaatatggaaagagtgcaggccggccagggatcgagtttccaagttgttcatcgagggactgtgaaaagaagtaggattgaagtggtcattccgactctacaaacttcacgggtatctcataagcacacgtcgctggaggagcttcgtgatattggccattttgtcgacaagcttgacaagatcgaattaccaaatcagattatctcaactctgggggatgcaatggctcagaaatatcttcacctggtccaatccgaacttgcaaatcatcgtctaaatgagtggctgagaagtttcctggaggataagctggaattgctacgtgaggatgaggatgatgaacccgagacgttatcatatgtgttgggttttgttgtggggtatgcatcctatatcaaggtatggttttcagacagatcattgtcaattcagacattaaccaaatattaggacctcccatcctcgatacgttcattcttgaagtcttatctggaaacgtggaatggcaaggataatcgtgaccacgtcttccggcttctccagtacattcccattgaatctttcgcgtcgcttcgaagtgaattatggtcaccattggagtcagctgtgttggacgagagtcttcgttccagaacagcgttgttgggtttctattcagccttaatcaaccaatggggtgtgaaactccgatcacagtcagacaaaacagaagaatcggtgtatctcagtcaaatcatcgtacacgccgagctcctagcctcttcgattctggagttctcggtggaggatgaggataaaaagtccaagccagctacagtctctgtgctcgacttctacaaaaccctttcagaactcttttctcatgcaccacaagacgcccgattccgcatcacacttccgtacgcgcaaaccgtgtacacactcgccttcacgcctagcatcgccgtgctctcaaccctcaactccatattggccgtctacaaatctgcattcgaggcctctctgagttcacaagttctccaagcacaaaactccccggcttatggaacagatctcgttggtcggttcaacggatatgtcatggacatgtgcaatgtgctatggcgcaaccgtgcacttaacaccgaagacccgaatgcgctaggctgtctcgtcccagcaccgactaccactgcgttgacaaactatatcaagggcctgtccgaagcatccaaacactatgaccgcgaaagcgctttccacattaatcttacatctatattctctcttagtcaccacgctgcaatttgcaacctgtctgcagcttgctttgcggatctggaagaggaccagcaagttgcggatgaccgcccgaaattcagaaagccagtcacccagaaagcgctacaggcgctggagagggatggcggtgctaagattacatggcaggagtaccgtgtgcatatgctggactggttggatgcgattgggtgccggggtactggcgttctgatgagaagcacaatgaaggctttgcgcaaagagtaaactcatagtcggatgaaactgaacaccagttctagaaattaaatttctcatagcgccattgaaatgcttggtatcggtataatacatattgtacatgctcggctctcgatatgagacagacggcagcatagcggcgaagaggtcagaacttctctatcgagttcagatatatatcttgaacactgggatcttcccgcagagcactcaataggtcctcaagatctttcgcttgttcctcgtccttaaccacgaccatgctgtcccggttgggatcccagaatatctccaattcgtcaatgctgagacctgacaatttcgcgaatgtttcgcccacagtttttgtctctgacggatcggtcaagatcacgaggcgacccttatcatcggtggtgatgtccgccgctcctgcttcgatcgcctggtccaagtagtcgtctacattcgcaccaacgactacattcgcaccatctttcttctccataacaactctccctttcctctcaaagaggaatgtagtcggggtgacgattcctccattgtctttaatcatatagcgaatgtcctgtagcacgcgcgccttctgatccgtttgacactctacaaccgcagccactgaaccaggcagcatagcctcaattgtcagagattctagtgcttgacccgatacactgagtccttgtccgcgagcgattgctgcttcgataatgattttcgggatggaggctcgtttcgcattcgacaacgcgagggctagacgaggattgtacttcgtgtcgggtccccacactagaacatagtattaggatctgagatatgcaaaattgaacggccatacgtactctgtgtagcattggcaatttcctttcccactatttggcgttccctgctcttggccttgtcgtttctggccttgtcatgcttaatcgtagaccatttgttgtgaccggagaggatagccgatgtggtgctgaagtagcgacactcatgacaagcagagtcaacccagcgggattgttgcagcagcctgctaagtctgagagccataatggttttccttctccatatactgtgagttgtagagaagatcggatcgccattgagattccctcgggcggctgtttatccgatctccgcggacagtgaggccacacgataaggggagagacctggggttgacgcaactactatgaactagatatttccaccttttttccctttctttcttgcttatggagctacgcccgcactgaacctatctcatgtcttcctccgatacagccccagcaccctcccctccacaaaatggggtccctgagctcgatgtccctaaactacacgccctcccctctgaacaacaggaactgtacatgcttacgttcacctccgacctcgtgcaatacatatctgaattggaagccgcagaggttacattgcaacaaaaggatctcaaaaaggaattgttcaagatcttgaacctcccttcacccactatcactcgagtcctccgcaacaatctagggcgatgttttggcggaatactcagtaaaggggatcgcgggatcctcttcgaaacaatcacagacctgctggcaattgtgaatgctggcaagagtgaagccgaattaaagattaaatttgctgcggcgcattgtttaggagaggtctttgcgacagctggtgagagtgcgttcatgcagtccaatgttgcgatttcgggcgcactcaaactactgaaatcagcgaacaaccacaccggtcttagaggagttatctttgccgtgctgcgcaagattgtggttggaattggagttcccatcgatgaagcaaccgctcgcgacatctggaagcaggcccgcaacgctgctatcaacgacaagtcgactttcgtccaagtcaatgcgtgccgctgcctggagcagttggtcaccacgaccccattcttcgataacacacatgacttcgaccacctcaagacccttgtatggaaggttatcgacagccccgccgcgccagtgcggcacgccgtagctgcggttctcggtcgggcattaattaagctacatgctacggatgcgcacatcacagccgccccgaaaccgaaatcgaagaaatcgaagcgcatgtcgaagaaacctggcgcggggcttggagatgaggaggatgccgaggtgtcagagtcatcggtccctaagaaaaccgactcgcgcctgtacttccttcttccagacttgttgaggcagctttcatcccaatacctgaagagtaccacttcgaatcgctcacgcgcggggatttgtatgtgctacaaatatgttgtgcgcaatctgggagacaaggttgtcgaagagcgttatggtcagattgcgacgaacttgcttgtcgagttgttgaatcatccaacagtcacatacaatcgtttccgcctccttatgactaggaagtttatcaaaagtattcttgaagataccattggccaggaattgctgcgcgagaacagtcaactcaatgccgcaacatggctcaccaacgatatcctcaaggactacccccaggttattcaagaacgtcgcgaacccaccaagtacacactgacgagtgcggtcagcgctctgtcttcgttgatctcatcgcttggttccgccttcagcgttcaggctgatagctgccgagatgctctgcttcaagtccttcctcaccccagctacactgttcaagtccacgttgcgcattgcctgcgaaacttcgtcctagcctcccctcaccagctgttgtcatgtgtgacaatctgcatgaacagtttgaacagagaaatcggacagctaggcaccccgcgccaatcgcctcgccggtgtgttggatatgccaatggattatctgcaatgctaagtacttctcgtttgcaaccactttatggagcagtggatgtctttgcgcgcgtttttacccaggcaaccgatcttcttaagacaagcagcacctccgagcttcgggttgcgagcatccaaatccaggtagcgtggattctgattggaggtttgatgcctcttggaccaagcttcgtcaagactcatctgtctcaattgatgcttctctggaagaacgctctgcccaagcacctcggcaaggagaacgctgcgcagccaggtacagttgagaccagtttcctgactcatgtgcgagagtgtgcactaggctcgttgttggtgttcatggagttcaacagcaaattgatcacatcagatggtgcaaagagaattggtgcgatgttgcaacatacggtcgaatttttagacaacttgcctaagccaaaggctatggaagatctttcacaaagactgcacccatccctgcaattgcaagattattcaactatggtccgccgacgtgtcttgcagtgttttacgaagcttgtgcatgtccatccacctagccatggggatattatttctcaatccagtcttcttagcctggctatttcttcattcgcagacccagatgctcagtacaagcaactagaaagctctatttctggctccgccggacaattcgatggtttatgggatctatgtgataattatgggtttggtgtcactggactctgccgagaatatattcgtgctacactgtctggcactcaagaagacgacaagagtcccgcttggtgtgcacttgactctgtggaccaagttgtggacgacaccttaactttccctatttgtcaagcaagcgaacacgacgcggttcttctatacagtttgcgagatggagataagcttgctgttgatcccccgacaacaggagttgtcaactcggcaatcgatttgttttctgtggctcttgctcttcattcgtccaaaatccaggaaagcagtgtcgaacagatcgctacattcctcacttctcctggcctgcaaagaaaccccggcaggaaagccgcattggtcgtcaacatctcggtcgcccttttacatactctgaaagttgctgttaaggagacagacttcgtgcctggcaagctgaatccatctactgataaaattttgcaagagcttctccaaaggtttgtcatagatgctgatcctgttgttcgcacaattggcgttgaagcacttggacggctttgtgatagtgctggaaatgcgtgcaccaatacacaagttaattggcttgttgataccattgtcgagaacagagaacctaacgcaagagctggctgtgctgccgccttaggatgtatccacgcccagattggcggaatggcagctggtttgcacctcaaaacgattgttggtgttttaatgtctttgtgtaatgatcctcaccctgttgtccatttctgggctcttgggggcttggaaagagttgctaactccgctgggctgacattctcgccttttgtgtccggctctttggggatgcttgctcaactttacaacgctgatacccacaacgaggaggcagctgcgttggcgacctccaacatcgaaatgtcatttttgacaccggtcgtgatcagccgatgcgtggactctctcatcaatgttcttgggccggacctgcaagacattgcgaagacccgaaatctcattttaaccctgcttcgccaattccagttggaggaaaactcagcattggtgacggaaagttccagatgtttggaccatttctcaatgtatgcctccagttatgtcgacattgcggcatacgtgaagcgactgcaaaccgagcttcgagcaggcaacaccctcacgcgagatgtggcagttcgtggacttaacaacctcatgaaacgagacgcaccatctgtaatacagacagcgggccagtctttggaagatgacatttggcttgcatttgacgaatcgccgaacaaaaagtcactgaagtcaatgattcaggactggcttcagcagacggctttgacagaaaccgagatgtggatccaacgttgtcagaacatcatgaccaagacacgccacaaggcagaacttacgcctatcacagctgttcaaactacagctgccgataaccccgatgacgaggttgccgggtttgcatcggctgctggggaagggcaaggtgatgctgcgaacggaggcatctccagccaagaattattgaagtggcagacccgcaattttgccatgagctgtctctccgaacttctggctactgtccaggaggcaattcttccagactctgccatcccagcggagttggctctccagaaaaacgtcggagatattgtgagaatggccttttcggcgtctaccgccaatgtcattgagctgcgcgtatggggattaaagatcatagaccaggttcttaagatgttcggcaagacaccggatcctgactttgctgaagcctcgcttctcgaacaatatcaagcccagattgggtctgcacttactcctgcctttgctgccgattcctctgcagagctggcctcggaggctattaatgtgtctgcaactttcattgctacaggaatcgtaacaaatgtcgaccgcatggggagaattttgaggctcttggtgctgggcctggagaacttcgcgaagaatccagaaactactgaaatcggtgatcttaagggtctcaactcaaatgctcgagttatggtaaagctcgctttgttctcggcctgggcccggctccagatcgcaagcatcgaccatgagtacttgacccaggtggttcaaccttatattgcaaaactcacgcctttatggctttcttctcttcaagaatatgctcgattgcgctttgagccagacatttctggtagcttggggacaacgtcgagcggtgacctggatgaggtgtatgcggcgttgaaccgcgaaactttgttgaaggtaagccccgatgtagttgttgtaattcggcaaaagctaataatattatcagttctaccaagacacgtggctatacttggttgatgcgattgctgggctcgtcgagaaagatatcgactttgttttcgatgctttggatggcaaattacagctacccgaggagcctagcggcgttgagggcgaagaggaaaaagaaaaagctcccgagaaggaagaagggaaaggacatgatattaattatcgtgaagagccggtcgcattcttctttgtcttgtttggactggctttcgaatctttggttgatcagggaacttcggcatcgcaacgattggagattcttcaggcgctgaagcgaatcctgaggccggtcatctctggaaacgccatctaccaagatgcaattttcacagagaccatggacagctttggccgtcttgtgttgacagaagctacccccatccagactgtcattgtcgagattgcccaaaacctgtcactagaccaccccgcagcaaagggtgatctggaacgcagcgaccatctttccgatgacattgagcaactcttcgagctcacaagaagcatcattctagttctcgctggaatgcttcccaatctccgggaatcgacaccgctcgcgcggttcaacgtcagttcggatgagtctctgactcttattcgtttagcacttcgctctcttgtcgatgttgcatccgtattcccatccatcattcgcaacgatctccacgcttgtatcctgcatattttcacaactatcctcgcaactggagtttgccaagagtgcgtagttccccaagctcttcccatcttcaggcaattcgttcacggcattacccacacaacagaatcacccgaagaccttgaggtcgtgtcattccagctgcggggatgtctcacgcgcttcctgaccattctcactatcgctcagcgacgagaatcggatatctctattccctgcgccaagaacacgcttctcgccatcactttcctgctgagtgccggggcacacgttatccctccccaggagccagtcttgatccgagttctggatgagttgcttgactgtcttcaagacgttggccttgccaccgtggcagctagctgcatccgttcaattctcgttaaacccggctctcgttccattaccgacgaagtgatcagccgatacctcgtcccgcgactgattgccttcatggttgcctgccctctagacaatggtgatatgcctacggaccccgaaaactcccgcacggtagttgctcgcacgctcgtgtcgtgtatctccaacgccactttctccacttccgaactgcccgccgctacatccctaatcatgtcggcacttttggcacgcgccaagcgtgaaggcgagtccgtacaccaagaatccgcgagccatctccttgagcttgcgaaggccgaccagctcactttccggacgttggtggctaccatgaacacagaccagaagtcactgctagaggaggttcttcgaagtgccggagtcggagctgttgcttcgaagactggtgctgatgcggcagagaatgctccccaggctgtgcctagtatagcattgcgcatggacttttaggaacgttatacggaatcaagacaaacaaaacactttatgatatagttaattggcaaatatttcttatatgccctctcggaagacgaagccctccgaggctccgatcacttctcctccatttctcacttctcccctagcccagacgggcgtagtgtttcatcatcctgggaacccgatattcgagcaatttaaagcgtttgagggaatactcgcatctccactttaaatatctgtaaacttgatgagctcctgcttgcccctggatcataccccctagcccccacctctttcccttcgaacatccctcatgtcaggctccgatcacttctccccttgcccagacgggcgtagtgtttcatcatcctgggaacctgagatttaagcaatttaaagcgtttgagggtatactcgcatctccactttaaatctctgcaaacttgagagatcctgcttgcccctggaccataccccctagcccccacctctttcccctacttatcctcatctcaacagaaccaaggcctgccttcgcactcatgactactaggaggatacttcaaactacacgccatctaccgatctacagccaattcgcccgcccaagcgttacccgcccgaccttctttcgctttcccttcgaacctccctcacgtctcgcaaagtccttatctacatcacatttcaacacaatcaggagtctctcaacatccaccacaatggcctctcgctcaaagcgcgatcccacaatgtattcctttatgaatggggctgatctggtcgaggaacttcttaggtcgaggaacttcttaaggaggatggattcacaacatggggcttcgtgatctttcattgtacgtactataacgactctgactgggagaatttcatggctcgcatggtcggtactgtcttagaagatcttaaggaatatagtgaccttgaatctcttcgataaattcgccctaacgatactagaagaccactcctttaagtgtactacggttaccaccctacgtgagcacttctattagtagaagaagactgtattaaaagaggaacagggcgtaagcgaagactatactctaacgagtggccgataccacttctttatcactgtggactaggaggctatggagtccgttctaaacacccctatgggagggtttgaagaatataaattagggcatatctgtatggttaatgctaaatagaaatggacagatgcgcctgaagaggactctaaggacgaggatatatcagagcctaaggagtttaagccccttaaagggtatactgaggatgatatgggctggatgaatatacgctggcgtattgtgcagcttctgggattctataagatgactgagattgatgactagtaggcgtattatgtccggtatccggagatcgcagacataaattgatatctacccgtgctggaaacagaatttggtatctagcactattaaacagtttcttcaatcgcgtttgggttaaatgagctagtaacatgggcgccgcgctagagcgcggctcagaaggagcgtacggagagatcacgtgacctgaaacacccaacgactaacaattagttgcgtcccagtatagcttaaacaccattccaccatgaaaaaaccagatgacaatggagcgattggggttgccttcaagccataatttcacacaaatacaaaacacatcgcagtccagttccacaggctcagagaagaagtcgccaatggttcagtgaagtttgtgcgaatccaatcttatgtcacagtggagtaaacctataattttgccgttttgaccttgcaaagtcttcaaatatcgctagctaacatacttgaatgtattttctaatatttgtataccactctcgagcagcaatgtttgatttttgaagatggtgggcggtgtgaagccgcagaaagttatgtggtagaactgtatcaggtgaccttcccttcccgtctcagttgtagttcctcgtctacatagacttcaacttcagatcattatatgctggaattcctgttttttttttttttttttttttttttgagaataagtctctgcctgtgaggtagaaatgccgccggatcggggtcgtgcctctaaagcatgcacctcatgcagaaaacaaaagaccagatgctacgagcccggaattcctggacgggcatgtatgcgatgcgaccgacttcaccagagttgctcgctcgtccaaattattgcttctgacgaggaatccgtagcccccgcaccagacacagatgctcggtatcaatcccgcagctcatgtttagtctcaaactgacaagcttctatagtttggaacgtcttgaaaagactgtggctactctgctcgatcggcttggagaaggcccagcaggtactccaggtcatgagtcgagtagacctacccccgtgcggacgagcccgggacctggcgatgcgtacaaggacgcggaatcctccgcggctccgatcatggtcatccgcgatctagcaacggacagcggcatcaaaccaatgtccgatgccagatccctcggggctgtattggacgagcttatttcgcatgatcttgcacttacgcttataacaatgtatgctgcatgaattacttcatcatggcgaattgtcactaaccttttattagtttcctcgatcattacggtcgatgggttctctttgatccgcagtgcgagccaagcgagcttctccgccgagtgaaaaaatcgagcttgctattcagcgcttgttctctgatcgccgtgcggcacacttccgaggaattggctgcaaacttagctccgaagttgtatgaatatgtccggtcccttgcttccaccacccttctagtttccccacagcctatagagttctttcaggccaccctaatcttatctttgtggtcgacaacggtcggacaggtgcctttgagtattgatagctggcttttgagcggtttcgctttacagcactcccattccagcccgctgtttactgctgtcacgactcagtctcatcccccaaacatattggatgaggaaactatggctaattgctatctctggaatcatctctgtcttgctcacatgcattattgtgtcggaaccagccgtcgatccatgctacaaccctggcaaatcgagcgatgtcgtgccatcattgtttcggatcatgcgacaaattttgaagtgcgcatggtggccgagatttatctttactggactgtatatgaacatctcattcaggagtcggttgatttactgaaatcactggcagctttgcaggactggcgacgaaaatgggaatttgtccttggtatgttaatttgacttatatgtttgcgttttcgctaatgggttttgcgatcagagcaaccaaggtctcagtttctctcaatgggctttcacttctctcatctgcttctatatgaacatgctctgaaatccaagtcttcccgaggccgagaaccagttgtgtcagaaatgattcgccattccacggcaatcgtgcaactggccatggatacagtagatgagcgcacgcgccatttgaccgaccacatataccacatgatcacctttgcggcgattgttatctgccgcctactgaatgcctaccaagaacaggttgcctcgactcacaacatcgaggaactcgaatttctcatacgtgacttagtgcagtggatgtactgcattgggttaccatgccatgcggcgcatactttaggaaatatcatcacgaaagtgcaacaaaagctccgaccgcatgtcgagctaccaccagcaaatctgcaaccagacgagctacttggcgaacttaacaattattatttccccgagtttcttggattggggatttcagctaatggggattgggatcttttgtccaatatgggtctctttccggaaagcccatctattccagggagacctgactgagatatcaagccgtttaatatgcgagttagaaaccatataatgcggtaacatagtgacagctcttcaccgacccccataatgcctttcaatccaccggaacagagggaatacagccccagagaatgcaaaggtcaactcgtggcctatatttgcacctttcttgccaatcaaagaagcaataggacccgaataccatgcggttttcatgccaagagcagcaccgaggaacccgaatccgaaagccccgatggcggcccatccgaatggcaaatcagcaatgctgttccaagcatcgaaatcatatccattccatccattccatccatgccggaaaatgaaatgctcttccattaccagagtgatgtggatcacagtccagtacccaatcacactaagcaatgtctgcagagtatccgagaaatacctggctgcacaacaaccaacgactatcgctgcgatgaatccaagagtgaccataatcacacgaggaatgcgcatagcccacggtcctagattctgtgcgtgtagtgcaaaggagtagttgttggggatgttattcttttccaaaaattagcatgcaaatcagaacaccaactggatccataaactcactggaattgagctcaatgccgcaagcaccatcaagaacttcccaaatccccctgccggctccagtgccatcttgagcaaccccccaatcgaagaagccgtatacgcctctttccacgctgtattggttatagtgcctgtatacaaggccgcaccaagagtctgaacaagcacagtaggaacaaagatacccacataggtagcactgaagatctgccagcgcggtgtatccttgggcatgcgcacattataatccgccgcgcaattcacccaggaaaccgagaaggagaatatcaaagccatgtatgtaagaatagcagcagctttgtttgagccctgaagatgaacatggtcctcgctcgtgagctgtgaagcacccgtcccagcagcaacacaccacacaattaaaggtgggatccagatgaatgtgtcaagacgatggatccagttgataccgagtacgcagatgacccagacagccacgcagatcacgatcacgccggcccaaatgggaaaccggccatctgagacggcatgcaggacagctgcgccggagatagagttgattgcgttccaacctgttgtggcgatcatggagaatatgacgacgagcatgttgccccagtagccgaatgagtatcgtctaggattcgggtgtcagttacagagggctacctataggaatacattactcacgagaacgtcgtcatgcgtagtcctgttagtccaaatacggatgtccaggctggtagtaaatcgcttgtgatgttgactaggagaatgacgatgaagcagtcccagaagggaaggccgagagaacctcccaaggagccgatgttgagggtggctacagccatgtttgcactgaacctgttgatagaaaagggatactttagtggtgatcgatattcattcggatatctgtcttaccagaatgtagcagcatgccagaacttggttgtattctgttgtcgctcttcgtcggtgacacgttcgatgccaccttcttcgatggagaatcttccatgaaagaatgattgatgaggcctcactggctctgcttcagactgtgctttctgtatagattcattatagctgttcattttgacgaatggtcgagataaaaagctgaagtgaactgagcaaattgcgactttatgccggggagacactctcctttctatatttccacaatatctccttttttctactcatcttctttccattgatagcacatcagacactgaggtctgcctattagcatccatgattgggcttatctcgcgccatatcgaacacatctcggctannnnnnnnnnnnnnnnnnnnnnnnnnnnnnnnnnnnnnnnnnnnnnnnnnnnnnnnnnnnnnnnnnnnnnnnnnnnnnnnnnnnnnnnnnnnnnnnnnnnnnnnnnnnnnnnnnnnnnnnnnnnnnnnnnnnnnnnnnnnnnnnnnnnnnnnnnnnnnnnnnnnnnnnnnnggctaatccttaccgcccgcggcatcccgcggcatgccggaccgggatgccctaaagaacatggagtataatccacttccctcgatttcgccaaacataaagtcccctacatctgcattacagctcttttcgtcagatcaacttcttcaatcaattgacctgtctacaatggagcagcacacattccgccgccgaggcctcggtctccgcggagtcgacgccgagcgcgtctcgccaggctacgttctatacgcacctctcacctcaaacacagcccacctagtctccacaacaggcaaagaagtgcaccgctggacgctcccccaccgcagcggccgccacgcccgcatcctcgcagacggcaacctcgcctacaacggcgcgcacccagacgcacccaacctctttccaatgtgggcgaagtaccgaggcggcgtaatgatgcaagtgagcccagacggcgaaatcctacggcaatacagcgacccgctggcacaccacgaccagaaccacctcgacgacgggacaatcctgtacacaacccttgagccactcagcagcgccgaagcagcgcgcgtgcaaggcgggatcccagcaaccgaagccccaaacggcatcatctacggtgactgcatcaaactcgtccagccgtggtcaacaagcaacacctcctcctctgcggacttcgacggcagtggcggtaaaacaggtgccaagctgctctggtcgtggcgcgcgattgaccatctcgaccctgctgtctttgctgcccatccgcactatacgcgtgaccactggccgctcatcaatagtgttgcgtttgactcaaatggggatatcattgcttcgtcgcgcaatgcgtcgagcgtgtttgttattagtcgggctacgggtgcggtcaagtggcatcttgctgcgccggttgtcagccagcagcattgcgctcatgagattaacgaggcgggagacatgttgattcttgataatggtgtcttcaggcctgggatttcggtgccgttttcgagggcgattgttgtttctaaggagggggttgtgaagtgggagtataaggatttttcaaccggagggctgggattcttcacgccgtttatggggtctgcgcagaagttgatcggcgggaatgttctgatttgtgaggctgctagtgggcgggttatggaggttactgaagggggtgaggttgtttgggagttcgtcgtgccccagctggggaactataagcaggttatgaagaaagaggagttggaggagatggaggcgattgggtttgattatcttagcaatgcgattttcagggcttataagtatcgtcctgaggaggtgccttgggctaaggaatagcggagattccagggggctgagatttgatatgcgaaatcagatgtgactttctgattgagtctgttgtacatagcagggtaggtggttttttcatgttctataaaaaatatatatatcggcttttgtctaactggtggtgatacaaggtgtgtacagagagagtctgatcaagtggatggatacatgagaactgagacaaaatgaaatagaagaatatgtggctgagggctataagacaatgggaatgaaaagtgtaaactggataacgaaagtaggcgtatcaggcgaggatttacgttcaaggtttcaaccaagtgattcgccgagatgggcttcagcagacggaaagactgtctgaatgccaccatcttggacggctcgaacttcagtagcgatttctttgctggcagcgggcttctccgcttgcttggcttgcttgggctcaggcaccttgtgcacggaagcatacttcaagaagacgatgatcatgacttataatcgagttagctatacgaaagagccaactaggaacaatggggcacttacaagcacagatggcaatcgtcgaagcagcgcgtctagtcaaaatccatcgcagaccttcaatctcactctttccatcgctgttaagcgacacggtgatcttgtagttcaattcctgaaccgaggtgtcgatggtccgctgcggttctcgcgtggacatcttgtggtcattgaacatgcccttgatgtcgtctttcatgcctgaaagttcctggctgagacgctgcgagataatatccgtttcatgctgcaattgcgtgcgcgaggagcgctgatgctgtatttccgagttgcgagctgtctggagcgatgactgaagctcggagcaggctgctttgaacaggtattcttcattttcgacatcagatttcgaagtaaggctcgccctagccaaagagaggttgttctgcaggatagcccgcacagccttcatgattgtagtagactgttcttcgctgtagccacctttggacagatcctgtaccaatgaatatgtgtcgaaagggtgaacatacggtgctgcagacaaatgcggcgggcgatcgtcggacgaggagggttccccggttggggttagaaacaccgacggcgagggcatgtggaggacatcctcaaacggagtttggtttgtggatgaagaggtatctgtactttcttccgatggggcttcggaagcgggggacgaagaggccgaagcctgttcctgttcggcgccgtctatatctttggcctgctcctcgtgcggttcccggtccgtcggagggttgtcttccttgtcttcctttgtttcagcttcggttggttggtctgcgttccgttggtctgcggtcggggtttccgaagaagtgacatctgcattgttttgctcggcttcctggggcggcggttccgactgtgactcgtccggtggagcttgcccctggtcggaggcatttacaccatcatgtccagctgatggatcgcccggcacctcctgatcgtgtggacccttcttcggacgcaacgaatgagcagtattcggttcgacggcaggaccatatcgccgctggtaggaagcacgctcctgttgctgactcgtatggaagcgttggttaagccggtatggaattctaattgaacggtatgttctcggttcgcatgatcgcaccgcgcgcataaaattcggatacaggaacgggagcctgggtgtggccatggtggtaaccagcatatgaagaagctaaagtcttttccgcggggaataatcaacgtcactccgtctccgggcggtgatgtatggttagtcagctatacccgtccgcgggtcgggagcttccttagctgagctatccgacctcggaaggatctgattggttgccggtacctgctgtggttactattaatatgtacggagtacagcttgcctatatataggttcctacaactattctagcgaaaggaacaggcctgataaaacgtgtatagcctgccggggataaatttcgacggactagcccttttgcaatcatcttatcccaacgccaaagccaataaatgagggtatgtagtaggataatggtctgggttttcttatactcagtatatgacgagaatagtagcagtgtgttctactatcattacttgacagtctacatagatataatttaaaggatgtaactagatattgggactggtggccgattttgggcattccagagagagatctactcggtcctattacgatccgcatgattgtctatcatcaatacgactaggtacgcagacatagccctggtccaaccgaccacttacatgcaaccgctaacctaattaggcatctggatctagataatataaaaaaagagtatgcatatatgtgtaaaagcgcaactaggtatatatatgtatagtcattgtcggcagatagagtacaattcttcttgcagagatctctgtgaaacccttttgtttgctgcatatgagcagccgtttgttgtagcatctatgaaggctacccactcagccgcatcggaatactgcagctttcttctctctactatctctgatttgatcaaatttcagacccagcatggccgaccttattccaatcatttcacaaatagcttattgaccatctgacagaccataataaagatccatagtatctctatctaggagaagaatatacgagtaattgaatagagggagtaatatgaagtttggacctcacgtcaacagacttagacatcagacagctctgtaaagtcatatgtctgtttgcaatacaaggatgttgccctttatgtttccatttatggatgtttgtgtttgtttgggacaaacaacgtttagggaaagagcgactaatgaagaggcatctccaattcgggaaggcacgcgtctggtcatttgacccccaatctctcctcttccacttctctctctcctctatcgacttgtttacctcttcggtccacctcgatcttggtcccttcaagctatcaattgagacggagacgaacccattgtcttgtcttggcctggctttctaaaccataccatttcctgtcctaatataaatcacattaaaatcccccaaaaaaagaaacatccttcgccaggcgtcaggcgcgtctattaatccccatctgtgtcgaccaacttctcggcccataaacaacaagcattgagccttatcacaccacaatggcgtctgtacagactccgtggacctcaattctgcttcaggaaaagcctggtctacatgaatacaatcatgccctgtcgaatgtcgaaaaatactacactcgcttgcagcgagctatgcaagatgaatccatccatgatcaactagttctcaaccccgaccaaacacactcacgtctgctgaaatcctttgaaatcttgcgaaccaagcaactgcccggccctgtcgccgaagagatcttcaagaccatggtacttccattcattcacgacaacatcttctcgccgccgcagatgattcaactcgttggatctgcactacctcttataacaaaacaacattctcaattcctgcgagacctcgcaagcactctcctctcttcacaaggcttgttcgatcacctggtggccaacgaaaattacacagtgattctgaaggaatggctgttctcgaaaagaacccgtctttcccttgctctctctacgcaggttggagacaggttggttgcaatgtgcaatgcctgttccgctgatcatggaacggaggctactgtagagagttgggggattgctcaagaactgatggaatccatcaatgcgctcattgactcgtcttacgaagaagaactgaaacgggcaaaagtggaaaatctacctcctctggaatcaatgaaagttctcagtcgggacgataaaaagtcaaccctagttcaacaaggccccaagaaggaattgaaaaaggaattcacggtctcggacgaaatcctgcagcagatggaccacttcaacatcctaccaccattgtccgctcgaggcctcacccatgcagtggaacatcttcaaaatgagattatcccagcactgatgcgctctgccttggaaagcttcccatgcagaatctgtttggataggctcactaccgggagccttacaggtactctagccaattcgacagacctgccttcagatcgaactacagcaccgggcaatgcccaagatattttcggcaagagagtcggcctttggaaggttttgctgtccgacatcgctttcaagaatataaagaaattggttcacggaggtaagtttgatttctttcagtatgtgcaacttgatcgtttctaaccgcatctaggcgaatttggcggggtggaacaaaagctcagagatttggcaagcggcgaatggaaaggcaaagatctatctcatcgtgtgggatctaaacagcagaagaaaagaatgcaagttcctattttggaagtaagcgcttctgcaactgtgtcaatgttgtggcaggttgatgttggtttttacgatgagcttccatgggtacagcagcagattgtcaaaggtaaataactacctcatcgagacttccggatatatgctaactttggcagtgtggcaaattgtgacctcggaagaggaggtatgttctaaacccaagcatcatgagaagtctgctaattaggtttcacagttggaaactgccattgagcatatacttttgatccaggaaacctacacctctgaacttgttaaactctgtttagaacgtcctattcaacaatctgatggaacttggacgccacagcggttcggaaacgtgaaagagactgggtcttatcggatgaaatccattgcttcttccaaggcaagcccagctttgattgagatgtcaagtatggggttacccccgtcagtcccattgaaagctggattgtaggctaaccatgagtttccaagacaaattttacaatctcactgagccgtttttgaagtcgatcgttgatgagaatgacacagaggagtttccgttcgatctctcacccgaagaattagaaattgtgaaacacttcagcacatcaaccttgattctaggacgaagtggtacaggaaaaaccacctgtctgctgttcaagatgcttgccaagcataaagcaagacagtcagcgtcggatgggcagcaagcccgacaggtatgtctttgtctcctcacaatgtcagatgagaaactaacatgaatagcttctcttgactcgctcctcttatttggcttcaaagcttcaaacatatgccaaaagtctgatagacgctcaatccaaggctccatcgactgaagaggatgtagactcagatctaagaccgacctccttcttcgccctgaagaattggcactttccagttgtctgcacttacgacgagtttcttgggcttctagaaaacacaatcaggtttgaacatctaatgccaaacttttcaacattttcccactaactgaagtagaatggcggatcgaaaagacttcttaagagacatcaaccccaataagacaaagggcctagaagtacaagggggagacaagccacgaattattgacttcagtattttcaaaacagaatattggggctctcttagtggattagccccaccatcttgctctccagagcttctcttcgcagagatcatgggcgttattaaaggctccaccgtcacggcaaaaagcctaaagccgttatatcgtgcggaatatgtcaagaagaatgccaaagcttctcccgcttttacctctgaggcagagcgtgagaaggtatttggagcttttgagcgctatgaaaagcaaaaaaagcttcgcaaggagattgacgagttggaccgtgtcggtaccttactgaagtctctgagagataacaaagctctagcagagcagatccaacgctgcttcgaggagatttatgttgatggtgagtctagttctcaacattcgagagcaaagtactaactatgtgtttaagaaattcaagacttacgttgtctggacattgtcttacttttgggttgccttagtgacgcccgtgggattcaccttggtaaggtctcctgaaattcatttacgagcttaatcgactaatataacatagctggtgataccgcccagtgcatctcaaaggactcggttttccggtttcctgagataaaggcttttttctatgaacattacgagatcattgccaacgaactaaatcagccctcatttgccaagcccgttcaattctctctggctaaaaactatcgctcgcatcagggcattctgagttttgcatcatgggtgatgcagctactctggcatggtatgaaagactgcaatgatcagacttgtttctatctaacggtttatgtataggattcccggaaacaattgacaaacttgacccagagattggctacattggcggaccgaagccaattatctttggtatgtcgtatcgcatcgcttcattggcactcaatcactaacaattgtcgcatagcgggatttgactcctccattctttctgccaaaatgattggtctggtcaagcttaatgacaaggtcgccgacttcggcgccgagcaagtcatccttgtccgagacgatgcatcaaaggacaaattacaaacccaaattggcgagattgcccttgttttgacaatcctagaaagcaagggtatggagtttgatgatgttttggtgtatgacttcttcggcagcagtggacttggcagtagctaccggtgcctttacatgcttgtccaagcatcacgagcgcagtttgattctcaaaaacatgcggtgggtatattccatgagataatcagcccgttatgattgctaacattttcaaccaggctttgtgctccgaacttaaggtatatctatctctttgctaacaatagttcttgctaacaatattaaccagtcgctttatgttgctgtcactcgagccagaaagcaactttggttcatggaaacccaagagaacagcgttgatcctattgtgcaaacactctcacagagcaacagcctcaagctcgctgaaattgtgaagcagaaagaccccaatgtaagtgatattctaattaaaatggcttgcatactaatctctttcaggttgcggaaaaggtcatggttctgcgagccggtggctcagtggacccagagaggtggcttaagagagcagcacattttctccatcagaagagctttgcagaggtaatatactgctcactggctagaggagagcttcatgctaataaaagttgaacaggcattgttcagctacaagaaagccaataattctcgaggaataacacactcgcaggcctgtttgtatgagcaagaaggaagatcccaccgagcagcgggagataccgaagaatttaccgtatgctatgagaaagcaatcgctcttttccttgaggttggtcttattacagaagcggcgatgtgctacgagggacttggacagttcggcaaagttgcaggtttgtttttcaatcgtcaggtctgagaaatactaaccccctttctagaaatctggaaggagcgtgaacaatatcaaaaggctgcatctttctatgagaaaggcaattttttcaccgaagcttcggagtgttatcatgcttgtggccagtacgaggcggcaatcgaggtcttgcgccgcggagaccaatttgatgaactcgtcgcctatgccaacaggtttttacaccgaattctctctgcaatgattacacaatattaactctatatagaaaccgcgagtatcttagcgagcctacattggttcgttattcgagactttgcaatatcttgctgaagcagggacgtgtctctgccagtctgagggcaataaccatcaatatgcttggatcagatgtgtccaaaattgcctttttcaaagagtttgaaatgtggaaccaactgtgtacactctattcatcaaagtccagatggtttgagtattatgatctatcagtggctgttggtgacattcctgcggcgataagcacattactggttcacaaattgataccagtagtcgacaagccagttgttgaaaagctgtttagctattccatggttgaagtcttgtacgcccacagggacttaattccgagcaagcctgagcgagatgggctgctgaaatcagcaaagtcaacttatctcgaaaagcttggggcacagtggaaatcgctattgctgttggtcgacgattttgaggatgtggatttacccgcgtcagttaaaaccctagataagggtcttgtgaaggatatcttctgtctttttgtttgttttcaaccgagccatcatctgtgggtagtgcactaattattttcaggtgattgctttcgagccgtcaatattcaccaagcaaaagaccgaacatcttccgatggagattgtcatccgggttggaaaactgctgcaagaccttcatgctcagaaccagtactccattaagtgcctggctatggcttgtggtatttttaccaatccaaaacaagagagccatacgatcttgctccactggtctccattgaggacttacacagcaacgcctcttgatggttcttcattccagaacttgattgacattgcaaaaaacttcattcaagagaagtttaccgcagcacttgctcagttccatgaaaatgcactcagtctcacgaagagggattttctgccgacatgtgtccatcatctctacaaaggtaagctatatccgttgacgctctcttagggaaatatctaacgagttgaatcaggattctgtccaaagtttaagaccaatgaatgctcctggaagcatgagaagcccactgcagaattcgccattgctaagttgaatgtaagtaaaacaccaagaattaataattgaccaactaacacctagttaactcccgcagtgtcttctcgctattgctgaggtttttgcgcgcctcacgcctgtttattaccaaagagtcatgggcaaggctttcaacaaaccatttttgggtcgtagtaagtggtcggtccaatctcgctgtacgtttcagatctgacatactatagggagaatctggattcaacagatccaagaggagcttgtgattgtcagttcactggagcaatcttctattgcaattacaaatctgcgtttcaacttgcagagcaacccagagtttgctgcgaccgcatactgcctagaagacttgctgttctatcgcatgaacactgaatggggctcgatgaacagtctgagctcttctctagagaaggtccaagaagctcaaattctcggtatggtgaacttcttgttctgaaacatcataaatcggctctaataaccaatttaaacctgcaggccctcacccagccacgcgttttcagcgagcacttattctgaatatggatcgcatcatgccaccacgccctagacgatccggccacccgctcgcgttacctttgacaacgttgaatgctgctgagagaattcggtcagcggttggaagacgccacggtcaagattttgtgagagatgagtctacattacgtatcggactacactaacctttgtatagcacaacggcatcaacacctttatccaatgcctcgagaagacacctaaatcttcccttggctcgctccatgctgttctgtctgtgttcgagtttgcagctacgtatattgtgtgtttccaagtctcgttgatggtataacaggttactaacattgcacagctttacatcgccaatccagggaagggtatcgtgattccttggtcctgggctttgcagcatctttcaacaattatgcaatctcccgttaaagactatctgttcaaggacagagagatccgagtgcacataaccgacttgatgcaccttgtcatcagcttctgcaaccttatggagcaagtcgaaaatgccttcaccagcggtgctctgaagttccaaggactgggccgcaccagcctcccaatccctattgtcaaacggcgctgcaccgagcttttgaccaccgtgaatctcaacctaaatcactggcccaaacagccaattggctttaaggatatggagaaggtggtcaacaaggtatgtgtctttgcttatgacaatgtccctaaaacaagcttgactaaaacaaactagacacttcgatcaacccttattcctccgggaatggcgctagaattttctaacagtgataaattccggcaaagttgcatccgcgagtttgcagcctacaaccgcaaagatgagctgtgtgtcattgcgcttgacgatagaaagtccgctcctctcttcttgcgatctttcacacaaggaaacgtgaaatttatccagctcagtgatatcttgaaaatatcgcgcattaccgagaaccaattatccatgggtctggaagaagactggcaagttgacgaatataccggctacgagctcgatatgatcacgaaccttcagcgacgttggcgacaagtgatggaggtcatcgagaacaaccgccatagggcacaatctcgcgagggcaaacttatccagcacttccatgaggtgtgcacgagacggatgagcgttctacctgcggccgcttggtcaacccgagataaaatacacatgcgcaaggtcatattcaccgaaggcataaagatcgccatgtctcttgatggtgttttggacagtttccgacaactgaatgaccggtggaggcaacaattccacagcaatttgtccaccgcaaagctagaggagctctccgttattcgcggacgtgttctgccaatcgatgggcaacttgagtacatcgttgagcactggtctcttaagggcattgaggaaggtatgatgaccgttccggcggaggacctcggtgtctcagcccgtgaggcccagcgcgctctctgggctgttcagcgcgagattgaaatcattaaatctcaagttgagatcattgcgaagagccctgaccggtaagggggtttcttcccttccatgattgttcagcagaggctcgataaccgaaatcggcaaaaaaaattgaaaacgaaaaccgtcagcaaaaaaaaagctagttagccggggagatctgtgtggaacgaggagaatttcttaatatctggctccaaccatcttatggctggacgagacacgagacacgattgtatgaagtgaaatgtatgatatcttgtttgattactctgtaatggattttgtctgcgtactatgtaatcggtgtactttctaacagaaaagttacattcaagtacagtatatatcctttgcttgttgtattatataatgtaaagcatagacgggcatttggcaaaatacagcatccttctagataaccactcactgtcttgccaagaggccaaacagcagctccgtccgagtccaatactcagccgcaagcttcttgatagtcttaacagtctccgcactagaaccagcgctcttctgagcacgctcgacgacaccagccagctgatttcgctcgccgagcatctgagacagatacagagcgtcgaagaagagctgcaccctccagtcgcgcaggcccgcgacttgatctggatctgggctttggatctctgatttctccgccgatttatcttccttctgcttatcttcattggcagtggggtggacgtccttggtctcagccttgctaggggtattttcgctgtcgagatcatccaaggcagatgcgatagccgcctcgagtttcgttttcaattcttgcttcaacgcctgcacggtggacggatcccataggtctaatccgcacgtatccatcgaggaagtgagacggcgcaggagcttgaagctcgaaaccgagggctgaacaggtatggcaggctcgccttcccagagtgatcggccaggcacggtcttgatcttgcctgtctgggggtttgactttggggatgggatcaagctcagcgagccggccttgctgactacttcggttgcaagcagcttctgtaggtcagggacgatttcgctcgagaagacaaagtctccagatacaaagccagcggggatatctcgccggacgagtcgtataagccttagtaggaaggtggctttttcgctggaatacgaggagttgaatgacttgaaagcgctgctgaatgatgtttggagactgctgaatgcgtcccgaacggcagaatgcagagaatcggataggtgtagggggtcatcttcgttgagtcggggtgttatgtcgatatcttcatcttccacttcacctccaacgagaatgtcagtccatcgtatacggcgtagagagtcgatagattcgttgactgcttcgattgatgctagccatgcttgatacttcataaggacggtagagacgtcttcgtcacggcccaataatctgtctactacggttcgtttgaatgcctgtgcgccgttcgtgtattctgcggtaatgagatcggaatcccacagagatccaacggagttgtgttcggtattctcccattctgatatcatgtatgaaacttgagcaccgacttcgcctaggctttgtgcttgcgtattcaggattctggcaagctggttattgaagacatttcgaagactttcgaggacattcacagagccgtgaatgatcgttgagccccaggacgatagccacagttccacagtctctgtgcggagcgagagaagctcagagaaatcggtgctgtggaccaagctcttttggcagccgtcggagaatttattgaaagcttggagtgaccattccttgattgattccacaccctgggttctgcttagttcgctgagcttgatccagggggtgaaattcttcacatctggagctacccagcggccaagaacttcgacctcgaggccatctagactctgaatctctgggtcggagaggaggggcctagctttaagtttcatgagcacatccgagaatcgatgcgatcgcaagacctttgaagcctgaagtgttcggacgaacagctggagggctctagggatgttctcacgagatacatccaactggttaacaatgatgcccaggcgcactcggtgaaagcgatggatcgcatcatcggaagaagggctctctacaaggcaataggcggccaatgattcaatgatagtgtcttccgtagcgcttgtagaggcaaggcgtttatcaatccgtttgataagtgtctgccggagggacgctagctggttccagagatcatcgaggaatggagggactgattcatgttttgataatgtcttgtgcagtaaccgcgagacaactagaatcttcgcaatcagcaggagcgagccgcgacgtcgcaaaagccggctgatagaggttgtacagcggtggaggagagaaagctgcgctccgaatgcgtgcttctctgcgtctatatccacattatcagctactagttcctgatttccgccagaactaggttcgtacctttctcatcatcgccagtttctatttgccggacatgaacatgcttcctttctataagccgggggttgcaccggcgtccaacatcggccagaatggattccacgccttgaatgtctcggttcatagccacaatcgtctcagccgtgccaactaagtcacgatatcgtgtcctataatcggataatatacacattagcgaagaaacagcccctatggcaaatcaatcacataccccacgagagctcggagcttctccttattgctcgcgatgtcccgacgcagctcctgttccacgcggcggacagtgggaatggggtattggaacgcatcgtgccatgatttcaagcttgaaggatcaggcgcctcaggggccatgctggcgggatatgtggtgagaccgttggttcatagagaacaagtaatccatgcgacaacggatgcctgacagccttagactcctggctagctcggtcttatcgttatcggcacgtgatggcagaaaaagtcccccgccaccgaggggaaatccgtcatcgttggacggaccgttttataccttacacaacttatattcaatatgccgttgatcgaatcagacgctgctgtggcagagacatcatccaccgatctccctgatcgcctccctttccctcccacgacatactcccatatcttgcattgctcttatcatgactggcatccgcggtaagcttccatatgactcaacaccaaacatatctgaccgaagtcctaggtaccgcacacttgccccaaagtcgcgcgtcattcctttgactgctccttttgttgaatacctccgcgccgacggcattgttcttccgcccgaggccgttgccccaaccgacgatgataacctggacacattctccgattcgggcgaggaggagcacgatccatctacagcatggcaagagattcacactaggatcaaggataccatctctgaactcggtggcatcgtcactccgaaattaaactggagtgctcccaaagatgcaacattcatggccgccacaaacgacacccaatgccgttctccgaatgacatctacctcctcttgaaaagcagtgacttcatcacccatgatttggatcatccctttgacgactgcgtgccggatacaaccagcgacgaaccgacgccatccaccgttgactcaccgctgccggatgtgccgtattctctggtactccgtaaatatgtcaacttcaacccttcgctcgagttccgttgttttgtgcgcaaccgtgtcctgctgtgcataacccagcgcgatcagaaccacttcgacttcctcttccccatgcgtgatatgctccggtctcggatccagtcattcttcgatgacaagctcaaagacacattccccgaatccaactttgttttcgacgtgtatatccccgctccgcaccagcgcgtctggttgattgatatcaacccgtgggcgcagcgtaccgaccctttgctgtacagttggttggagattctccggatgaaggatccgattggtgtgcaggaggaagaagacgatggagcggaagagtatgtgagaatctcactttctgatggtaagaccatctctaccggcacggcggaggagctcgaaagagaagattattcgggttcttccgcctcggaagatgagcacgagggcgccgaaggagatgatgaacaggcccccttcctcccggaattccgtctcatcaaaaaagatgatcccgaagcttatgcattcagctccactcagtattcggctcacaaggtgccgaaggagctggtcgatgcttcgcttcaggggcctggcggcatgagtgaattcatgggccagtggcaggatatcttaaagaagcaggagcaagaggaccaggctactggcagtgactctgaataaacaacttcggctcaaaacgctgcgtggtataaaagcatgcattcttggtttagtggcgtttacctatagcagggaaattaatactgtggattcgaaggttttgtcgtggactacaggtcaatccacacattatcaataaatgaaatcaatatatgaaatcaatatataattgtcgccattggtcaattacctacatagaatgtgtaagagaaggttatatgctatgtcatatcaacaactccagtattgtgtgtattacttctatccttcgtcttgaagaacaaaatatgtatcgtcctgtatcattatatcgaaaaatgaccccgagcaagtaggagatacagccgcaagctctagtagctatatacaaaaaacctatcaagcaactaaagcttatgccttttctcaccagacgccaacctccggaactcttcctgcgggaatcccttcataaagcgctcaaggcccataaacgcctcaagaccattctggcgatccaaaagctccctctcaggccgccttaccagctccttaatcttcaacagactagtctggttcaagtgcgtaccaagacgatcatcaacctcctcaagcaccttcttcaagaacccatcagagtcatccttctccccggactccggcgcaataaccttattgacaaagccagccgaaaccagctcgtcacaggtgatccgcttgctcattaggagcgcctcattcgccttggcgatgcccaggcgctcaacgaaggcgcggctagcaccgccttcggcgacgagaccgagcgaggagaagggtgtcaggatgaatgtgtgtggggcagcgtagatgaagtctgcgtgggcgaccagtgcggctgagagaccgacagcagggccgttcaaggcgacgacgagaatcttggagtggttgtagaaggtgcgagtgacgtcgacgttgtttgcgacgaagcccttgactagctcgcggcgctcgtttgagttactatcgtcggggcctggacgtatacttgtgacgtcggctccgctgtagagaggagattagtgttagatatagttgatcttgtcaagctttcttttgggatgtggtttcgcgatatctagggctggattggggctgttgatgacatacgctgagaagaaacgaccctttccggtcaggactgtaatgaagatatcatctcgtgagtcaatctcgcgtaaacgctcgcctagaaggtagtataggtcggcattgagagcgtttagcttgtcgggccggttgagtgtcacgatcgccacgcgagcctggtaggcaacggtaatgaaactatcgtttgacattcttactgtatattgtagaaggaaaccgttcaatgggtcaccaaattgaactgtgattgcaatggtctatcatttatcagtcgtctctatgggatatcagggcacgcgaatttgcggggagccgaggcccgcgggaacttactttgttctgcctgagtcagcagaaataagcatgtatgttctgtttgtcctgtttgtcctgtttgatcaaatccaataatcacgcccgtgactggtccggccatggcaccactcggcgattaaagattgaagatcaccaacctacacaatatcgctgccccggtctgctggaatcaggcggtataatcaactgagcacatcctaccaacaacatcgaacctcaaaccccactcttagcaaacccgaagccaaaacacgccgagaaaaaaaaagcaacgcatcagactcatacaatgtcgcaaatattccgcaagttgcagggaggcaacctcgaagtcttcaaggtgcgtatctgacactcaagtcctctgagcgattattcccacctaccgcctcccaccgcctcttcttaggactaaccgagtccatgtagtttgggatgtacgtcctcttcccgatcggctggatgtactatttcggtaccaacctcgacgaccgcttcgccacgaagaacttctggcccactgccgatcaatcgcacaagatcccgctagacaaggacgagattgaccaggaattggcacgtatgcgcatggtggatgccgtgaagcgggagcagagacgggcggcggaggcacaggctcaagcgcaattagaggcacaggcacaggcacagacgatgcagactcagcaatgaggctgcaattagtgggtgtgattgagaggagctggcgacgggggctgaaacacaacatgcgctcattgcccaagtccccgggggagaaaatggcattgcgaaagggccactggtgttccctttggcgggttgatatttgccggggacaacattggcatcgcgctgggaagttacacatgtgctgatgatgggtttacttgtacaacactctgctctgggcatcgagggcgttctggagttttcgtcttatatgtatgttgcgttttcaacatattgctttctactatttacatctgcatttgctgtacatcattctggaaaagtgtgcaaaaaatatcaacttcaatcatggccacgttgcaacgataatacaagctggcatcatcgaccacagaactctgccaaggaggcatatctatatacagtgtggtgtgaatgacccaagaaaagaatgtaataattaataataatgtaatccgccgcactccgacaatgcaagtcataggggtgccgccagttcccagaacacaagaactccaaacaagcgccggccgacaggaagagtgataacgaggttcccttcgatatcgatatgcaactccaaagggattagggctcctcacttttgacaatagagaatgcaactgcaaccattatgcgggttttattcaaaggtcagccaagcgctcggtcgaggtggcagcagcgttctttgccgtctcgtacatcaaatccccgatttgcgtggccacgccattttcgccaaagaccgaactgattgacaaccgaccggagctgaacaggcgctcgccggcccagtagtagtaaaggcgcccgtaaatggcgagaaggtggtcgggaaggtaaatgtaagtgcccatggctatcatggcaatgaggccaaggagcagcgtgtctaaataggaaacgaaaggtcagcatggtgtaccaagagtattgtgaacggggaacaggcgcaacatactgaagatgagcttctcgatcggagtaagcatgtagagggagaaggtcacctcatactggtagatcttcaaccgcatccagcggaagaggctagccacggcccagataatgaagtccaccattcttgcggggtattcagagaattgtaggatgctccagtctttcgttgcttcttgcggcttctggtgccgttcgtttgaatttttttttctctctatagtctgagcaagagccaccaatgacaaactcgggaaatagacccggagacagtcgtatcagacacgggcaatatgtatgcccggctggagtgtggtgttgtgcagggaaaaatgatccacgatgttctaaatcaacgcggcgcggggaagggttgacgtaaggtcgcaagataccgtaggtacttaggcaattgagggatattcgttacaatcgggaagagcgtgttgacagagacgttggggttgataggagtaaggaagagaggataagactgaggtcacgctttttggtggactgtgctcaataagattccccttaaaatacttctgttttggttctgaaaatggctgtatattttgtttatttcatgccgttttggtctgagatatatggtaatatcagtatgcactagtaatagcataaacctcggctggtcgtctttagtatgtctacagcactctaatttttagaggtttttattcaatgttctaatttcattctttctcgggttagataggtgtaatttatgtagtacatatgtatagatacctgtaatgtagtgataaaggggaaggtgggagaaatcagagtgaagtaaagtaaatttcaggcattaacttgctctttgcggaggcctaaggccaccaaccctattgcctgatcatttgtgttttccgtgttttgccgtgacaatttgtatccagtacacaactctgacgctattccacacgcgagtctcaagtactcgatactttatgttttatgcacaatctgtacaatttagatgtcccgacattggatggcataattctctatgcatagcatatgatttatgtacacatctgtctgtaactaacctatgtattctaagcattactttggcaacaatattgagcataacaaactagatgtactactagctaacagtctcatgtccttttgctaatcaggatgatttgcccatacataagggcatggtccatggataactaagtgttctactattcagacttcctagatctcatttatccagtcacagtgaggaaagcttataatactcactaccatactactaaacaacaaaaacagaaatatatccaatagactagaaagagaacctccatttatctagaataccaagatcatagcccttgagtcaaccagcaaacaacccaaagtagccaaaaaaattaccattcaagcttatcttatcgcaaacgtcggcaataacctcaaccttgaacaaaccacagcacgaacaccaaacgcaatgctatctcgcctacgctggcggacattgtccccaacactagcagccccggcgcgactcttcagccaaacccccatcatccccgagaaagccctccccccacggctcaagatcaacgatgccgacatatcaatatcctacctaaaaggcaccgggcctggcggacagaagattgtacgttttaattcccaagcagattcctagataagaaccagaactaacaaaacctagaacaaaaccaactcagccgtccagatcatccacaagcccagtggggtggtaatcaaatgccaagcaacgcgctcacaggctcagaacgcgaagattgcgcgctcgctgctcgctgatagagtcgaggcgctgcagaaaggggattctagtcgggttgcgatcaaggctgcggcggcgaagaagaagaaggctagtaaaatgaagaagacgaggaggaagtatcgggaacttgcggagggagagaaggagggggaagtcggtgaggaggaagaggacgaggttgagataatatgggatgatgaggtaaaggagggagaaaataaggaggctgaatcgaaaattggaggtgaggccaaaacttccgaagagtctggaaagggtgtgtgatgtgagatttatgctgttatgtgttttgggatgtatactaggtctactgcattggtgtttgagcgtttacttttgagagatttacattcccgtggatgttcttctaatggaaaatcaaacaaacatttatttcatggatctagtgtctcatcgcaacatgcatatggtaatagggggagtggggaaaaggattattcctccgaaggagaaagcaaatccatataggttgaactttttgagttggaagggaagatcatagcaaagccactaagaaatgtaacttgccagcacggtctttgactggtcgtcaagacgctcttgggcgaattgcgaaatacggccactctgcttgctatcggcttctttcaagtacgagcccacccaagccttgaggtcagcaccagtttcgggccatgggtccttctgctggacacggatggtgttcagaggagtaaatccaacaccgaaggacatgtcttcgatatctgcatcattaatgagatcatccctggctgcaggcagcggcggaagctcgaggagcttgagcaatgccgtgcaggtgaagccccatcccttctggctatagcgagtggcaaaggcctgcgagttggcaagggtcttggtgaaggagatgatagctgtcttgcgatccaaaggccggacaagcttctgggtttcaggaagaatgacgttgatatagatgggagtgaagagtctagacattaattagcctacgaccaatttatactgtgtaagaatacatacccctcttgcaccttgtcggtgacttggatgataaagtccgcgctgtagcccttgttatcctgcgccgagaggaagtggaagaagcggacaaagcgaagagtcaggttctctgtcttggaattctgcagacgttgaagaatgatctgcataatcatgacaaagtagttctcaagggcagttctaggggaagggaagtcaggtaaccaccaattaagcgcttggaagatgtgatacgtacggtgggaagttagcaacaactgtctccaggagatcaaagccaaagctctcattggccttggtagaaactagtttttggaagataccaaggatgggctcgatctggttgtgttcaatgatgaactgcgaaccacgcggaatgatcgaggaaagtagccggaccaaggcggggatgtttcccttcgaatcccacataacaggcatcaggatagggccaataagctcttggtagtaggtgggaagggtgccggatgggttggcctcgagcagcgcagcgaagagctggaaaacgtagggcatgaattctgaaatttgtcagcaagggatcaaagatatcgacttagtttgatttagctcaccctgcacatcattctgaaggatagctgcgaagggcgcatacagcgcttgctcgagcttgtcaggattcgcaggagcagcaaagctatatcacgttagcttctagcacttggaaacgaaaaatgcgggaacataccggatgaaggcgcccatggcttcgaagtggaagtagtaaaatcgggggttacttgggttcgcgctgatgatattggtaatattaatgaagcgctggaggacgacgtccgtgaaaggcaccacgccctccttgatgacaaccaaaacccgcatcacacaacgcatcaagaactcattctcttgcactttttcaggagctggatcactctgaatcagctggaagatgtgctcgagaagatccttagcaagcggtgtgatctcagtgggtggaatgactgcctgtccttggctgtcggtgaggaaaagtactcgctccaaggcaatggcagcgtaggtatagacgacaaagttcgacgacgccaggtgcttcaccagcacaggtagaacctgctgccactgttccttggtgatgatactgcggaaagtgtacaaatacttgatagcgtcgaccttcaggatagggtgaacaccatcctcgttgatcagatccgcggcgaggttctgctggaagtaatccgtgatactgaccaactggttggtggcagtgacaccgtgcgaggaggtcgcagtgcccttggcagcgatagcggagtaaaggtacgtcgctgtgtccttggccttccagttggatgaatccttggcatactctgccaggtagtgctgggtatacttgaggacaacctgggtcactggctcttcgaatttctctgccagcttgcggaggaaatcagtggcagctcggcgtctggtctcgctatctgacccttccaagtcccgtcgaatgaactcaatcggctcgtcctcgaagagttcttcgtcggactcacggaggctcacattcggcaaaatgaccttttcaacaatctggctcaaggtttcctcggcctggaaagaagcggcatgctcgggcatacctgcgacagaggtcaagaagtgcagtgctcggctgaccaaaatatcatacttggtctcctggccgatggtggtgaggaagttccatgagctcccaatgaattgtccaacgtgaggctggaacacatccatgtacttctgcacgtagagagtcaaagcctcaaatattccagcgcgaacatattctaatagaccagcctccgtatcgtcgtcggtatggagtaattgattgtcgtaggtcaagtatttgaggaagattgtcgagattccggtgaggttgtcttcgaacatgggagggagatcgtgggaggaaaggtcataaaacagcttgaccatcaggttgagctgagtaaacccttgagtcagattctctttgttggtcttgttctgctcaagatagttatccagtgcctgaggtgtgttagcattcggcccaccgaagcaaaactgggtagagatccgaagatacctcgaacagggccaggaacggagtaccgaacttgttaagaacgtggttaatttcagtgtagagcgcatcagactggaacaaaggtctccatctcttgaaaatagagtgtgcgacttgcaacacaccaatgttgacggtggggttgtctggtgacagcttcgagacgaggtcctggagaaaacaaatcgtcagaactaacattacaatgctttgttgaatcgcaaattacatcaaccagagtatcccaccgctcccagaagtcactgtcggcgatcacactaacggcctcacccagctggctctgaattcctggcggaaccgagatcatcaaggagatcagctcacgcttgagagtggtgacttcatcctgctgcagcttgtaatttccatcttcgtccgtccagttgcgcttgataaagttcttgaagcatagagcactagcgagacgtgtgttgtagggtgtggtgtccgatgcggtgatgtgaagaagctgtagcgagaacccgggcttctgttcttcctgacgcaaagtaatctcggctagaagaacaggaatcacatcagtcaatactgcttcaagtaatagaggggtcaaatataactcacctgccttgttttgcctggggtccaagcttgcctctaacagagctccaagaccctccgccatcttgttacgtggggtatcaacacaagtgagggggttagatgaggaaagggaaagaggaaaagatagataggcagaattgaggaataattattcagaagactcaaaggggagcaagagttttgacaaccacggaagggagaagataaaaagatccaaagctcaaagataataatgcgagcgctcagtaaattgtcacagcccacataaacacagggagtacgctaagctcaatcgggttagaatgtcacatgcttgagcctctctctgcctcaggcatcaatattaccctatcggtctttcctgggtatggtcttagaatatagaatgagcgctttgtatgaatgaaaacggaaatacgtagaattgaagggtactgttataacgtaaatatttttattttattctctatattcatatgcttttcgtgacaattacaaactcctacggaaccatcatttgtaaccattaatgcttagacaacaatgttgctgacgccgttagccaaatccatctccttggcttgagacaaagccttgaccttgtcgaaacagccggccgcggcggaaaggaatccaaggaatggcttgctgggtgccagcacacgagaaatgtactcggggtggaactgaacacccacgaaccaggggtggtccttcagctcgacaatttccatgcgctcgcccttgtcatcctttccaatgaagtgaagaccggcagcctggagctgatcgatatactcggggttaacttcatagcggtggcggtggcgctcatcgatagaagtgcggtccaatccgtaaagggaacggagcttagaccattcggaattctcctggaagatggtaggacgggaaccaagacgcatagtaccgccaaggttcacttggtcaatctcaggcatgtacaccacaatcgggtggttggtacgctcgtcaagttcaaccgagttggcaccctccaggccacagacattacgagcgtattcaataacggcaatctgcatacccaggcagataccaaggtaaggcttggacttggtacgggcgtggtgggcagcgcgtatcataccatttgtgcctctggtaccgaagcctcctggaaccaagattccatgggcagtgtggacatcataccaggccttgtgatactccttggagttggtctcctcccactcggtttcgaggtgcgaggcatcaacccaaataatgttgagctttcggcgggaagccatagccgcgtgctccagcgacttgatgacggacaagtaagagtcatggagactgacatacttgccaaccagagcaatgttgacagtttcaaaagtgtgctcttgggcagtcgtaagggtcttccactgtttccaagtggactgacctttgagtaactgatcctgagaaatgttgagcttcttcatgttgagaaggtcacccagaacgccaaggaacccttgttcctcgagaagcagaggcacgtggtaggtagagctgacattgtgcacaccaatcacctgctctggctcaacctgacagaacatagcgatcttatcggtggtggccttgtcaaggggtctttcgcaacggcatgcaataagatctgggcttaaaccagccgagcgagcgtcccggatagcctgctgggtaggcttggtcttcaattcatcgtggatgatgggaaccagggaaacgtgctagaaaaagtcagaattgtctgaaatcgaatggtctgttggacgtacgatctggacgaaattgtcctttccagcccgacggcgcagctgacgcagagcctcaacaaaaggagcactttcaatgtcaccaagtgtgccaccaagctcgataacacaaacatctggctcctcgttgctgtcgtcagcgggggttctagccacacgctcgatccaatcctggatagcgtctgtcaagtgcggcacaatttgcactgtacgtccaaggtaatcaccacggcgctccttctcgatcacatgcttgtagacctttccggttgtgatgttgttatcccttccaagagtaactccaaggtagctagatcgcagaatatcaatcagcctcttgtttggcttcaaaaaaactcatacagaggagaatttaccgctcgtagtttccgaggtcaagatccgcttctccaccgtcgttcaacacgaatacctctccgtgcctaaaaaatcatcatcaggaacagcgttcagaaataaagactgatcaaccacgtactcggtaggggccatagttcccgcatcgacgttcatataagggtcaatcttgatcgaggtgactcgagcaccctgggtcttcagcagcaatccggtactcgaggctggagaaagttagggccgaggggactttttcagttcgatgtatagagaggggtaccaattacgcccttcccgatgccactgatgacacctgttatacatgtgttagttattgctcgttcataagagatcgactcagaataaatacctccagaaaccacaacgtacttcatcctggcgatgatagggatgaaaacccgactgaaaaacgatatgtgagatttgatattgagtttaaaaagaatgaccagtataaccaaagaccctcgaagtagaaaagaaatgtagggtgccgttcctggcttctgccaagggggaagaaagaatcaaataatttttgaagctgtaaaaaaagcgcctttccgtggtcaccgccccccactttgattgacttttctgccgtcccgataactatgagtcatgtgatttgaaagagagtaaagagagggaatatgcttgatggttaaatacgatgagtctgtagaggtaaattgctcgaaaaactacttataacatgtccattacaacctccaggtatgcccttgaccatccctatcaaaatacatttaacaagtatgaacttcgctttgatcctcaccgccccgtctgccacatataatgggcggtgtatgatatcagtactccgtacatcaggtgattgggctggaatatcttcatatccgtgcatgattgattaacccccctcaatccacatcacatcacttgcttgttgtgtcatcgatctggtggggtatactggttttatttatattcatcatctgaccttgttatctcggtccaattcacgatcagctgccaatcagggtcgctttgcgcgcgggatattgatcaccaaataccgactgtttcagcttgctacatatatttgagtccctatatgtgcattttctgatcataggaacatcctatgtagttaatcgctgttgtttgtcaatttccaaagggtaaaaattccctatctgcccttcgactgcctatcatggatgatgcaatacctggactaacttggttgtcaaatagttcacaaaccgcgatctcctgactctactctctttctgccactgggcggatgtcttccgatgatgttccacacttctcccagcacaaaccctcgtcaactagtttcgcagatgtcctcaaaactctagctgtcggtcgatccaaatcgcattccccagtctcattacaggaaagcagcagcgactcactgtcttacactgatacctccggaacaaaccggcgtgcgcacggatccgaatcaatgaatcgtgccagtttcatgtcgagttcctcggacactcccagtggcctggatttcgagacctcactccacaatctatcgcaaaagcaaaacctaacgcaggcgattgaagaagcggagggtttgtcaaaaggtctatcatggttcacctccgagcagtccgtggtgctttgggaggctgccgagtacctattgcgtcatgaaagctcgctggatgctcagcaaagcggtgccagattattagaagcgattgcagcccgtcaagatctgtctccatccgccaggcgcctagttttcgaatcgatcacttctccagccgagccggatgtgattgctgcacgcgtacattcgttgatctccctatcagatcatggcaggaaattggatttcgcaggttcctcaattctccatatcatctcctcgtggattgttccattctatgaaacgattgcatccgcacgatcaaaggcgaaaaaggcaaaatctgtcaaaccacacgggcccaatcacgacgaagcagtctttggagatctcttccaattcgcggtcgacctgatcactttgcaacgaagccagccaacccaggaggaaatcgaaatgcttctcacggaaatctttaccgtttgcaggagaaccagtgtcgcggcggatatcaagaactctttggctgtgttcgacgctgtcattatgtatgccgatgtgcctgacataagcttcccaattctcctggaagtcctttgcagcatccatgcatcagttaaacccctctctgggcccacctcacgagcagtgcgcagtctagcgaaatcacgaagacaggaggagatggtaaacacactccatgaattcctgggagattcgtgcgccgctgaacaaagtcggaacttgaatgttctccgtggtacactttatgtgttctcggattttgttcgtgctcatggccaagatggcatgccccagctttccttcgatcaactcatggaatcattgcaagtcattgctcaaaaagacgatagcagggtggatgccgacctgttagatctttgtctcaacattctggaaggggactatattggagtcgcattagaacaggattggacgggatttgccaatcttctcatactctgttctcgccgactcgtggacgagtcggcgccatccaccacttctgcgactagccctcggctcaaacctacgtacgacgaaaccaaatcctacattctggtaaatctcatccgcattgcttctgtgctcgaatctcagtgggaacaactcaacagagagcaaaagcaacatgcggtccggttcctcatgaagatataccagcacattgagcctccacaggctgaactcatcatccattccatgagagaagacaagctttgccatccttccaccgactcaaattgggctcagcattgtcgtgaactagttgagtgtttcgttcaaccacggaaacaaagctcggacatacgtatcctggctttggacacattgaaagaaggtctttccggccatgaggatttacttttcgtccaggagcacggtctactcgggcttctattgaaggatttttcggcagaacatgatcttctcttcttggagtccctggtgtctttgttgaccggcccggcgacacagtacagtgatgatgacgcgttcaagttgctgataaacaccatcgcagcaccgatgcagacggatctccatcaagaagaaccgcgcgagaatcctctgaacaatggatctcaacgccgtacatccaccacgagtgtcttggagttaagcttgacaaacgtctgtgccgtgggcctcgtgaagatgatgctgcgtgccttgaacctctccccaaccaaagctgttatggttttcgaggcacttctagacattgctcaatctccaagtcgaccaatagactctcgtttgacggtcttgaaactactttttcgattacgatgtgactcagctgggtctgtcacagtcatatcaacctccgagagtgactttttgatgaatgtgctgggtcgcaatcttgatggtggctctaagctacaggtccccggcgacagccccacctgcgagattcctcagaatgataactcaccaatctcgccagtcggaaagcttccaatgagagagtctgtgtcaaccgccatgtcgaagtcggccccggggcgtggctctagctctgcccgtggctcaaagttgacggcgccagtgtggacatatgctttgccacaagtgcttccggagcaaccacctggggagtctagtcctgtcgtatttgcttacgctcacccggaggactctacccccgaatcagaaacaatagaaacaaaaaccaagggggtgttgaaggtcaagatgtggctcgaagttgtgatcaccttgttgcagcgagaaaccgactgggatgtttacagctacattcttactcatatcggtccccagcttggtaacaaagactttttcagagatgctatccctcagatcacgctccttcgcagcattctgtgtgatcaggtcaagaatgaaaccttccacgagcctcccgagactaccggattgaaaaagagcgatgtggctgcctgcatcttcgatgcgctttgcatgcttgtcagctatcacgaacactttgccaagagtgaagaggatgatctcgtccgagctttcatgcaaggtatcatcgggtcatggggcggcacatcccgtgggtgtattcaagcactgtcactctgttgttatgaaatcccaatgtcggtgacgaaatcattgaacagcatccttgataggatgtcaaaggtgatcaccatgtcaaacattgccgtccatattttggagttcctggctctgcttgcacgattgcccgatgtttacgtcaacctgcgtgaggaagagatccgcactgtgttcggtatctgcattcgattcttacagacctctcgagagcatcggtacaaagcctctgaattggccgcaagggccgctctgtcaaaccaatcttcccagactaagccaaaggaaactgccgcccatgcaaatgaagctgtcgagacctcccaagacggaatgtcgaaatatatctcgaatctgacctaccatgtcatggtcttctggttcttgtctctgaagctccaggatcgacccaaacatgtgaattggatcaccagcagactcatatatcacgacgaacatggaaaagaggtagtagaagaacaaagccaagttttcattgatttgatgcagcgagttgcttattcggatctcggagagactatccccttcgaaaccttccctccttcccctgaggatggcccggttgcaaagaagtcctgggttgtcggcatgagtatcgtcactgtcgagagcgccggattgtctggattgtctcaggtaaccaagcgccaggcatctggtaccacatattctgtctatcaacaacggacggccccagttctgccgcatcaagttcctgcgactccagatgcccatttacattccgactccatgcggacagcagtccttccgagtcatatcatgcttcagttgactgctactgccttccctacacctacagtcatgcagcctatcccggttccggaagacgatatcactcgacgtgcgattagttactttgatcgcaccgacattgtggacggacatcgtatcggtattctttacattgacaatggccagacaaaggaggcggatattttagccaacactggtggttctgcggattatgaaaatctgctgtcaggattgggaaccaaagtgtcgctccggaacccccaattcaatccgcaaggattgtatgccgataccgatggtgaatacacctacgcttggcgggatcgtgtgactgaaattgtgtatcatgttgcaactatgatgcctacggactttgaccgtgacccggcctgcgtcaacaagaaacgtaatcttggcaataatcatgtcaccatcgtgttcaaccgatccaacttgcccttcaactttgacacaatcccatccgagttcaactctatcaacattgtcataaccccgtcatctcgaattgcctacgacgaaaatggcaatgccaattgtgagacagacccgcagaagctctactacaacgtgcaggtcttgagcaagcccggattcccagacgtctcacctgctgcggcaccaaaggtcatctccggcaagaacttggcggcctttgttcggattcttgccctcaatgcgtccgtcttctcacttgtctggaacaataaaggtggcgagcatacctcgtcctggaccacccgtctacgcgaaataaagaaagtccgtgagcgggctctcgcagcccaaagccaaggctctgaggccgccgaagtgacttatcccggtctgcggcgaaataccaaagccaacatcttctcggaggaattaccctctcgtgcaccgcaagtacagacggatttcgctgcggaatggaacgcagcggcagacacgaacattgtccagaatttggatttctcccgctgggcccgctaattcgtctttcttttcgagcgtcttgacgatgacaaccttaggcgagatatcctctccttttactgtctggatctacaagacaccctctcccctccctgatattcattcactccttatcttacaccacctctccctccacctttcctttcccctctcgatgaccaatgacccctagacgacttcatgtacaccacttgtgtttttttttcgtgatgcaagacaattgtcgcatttgtaaatacccccttcccgccccaaaagttttttctttccagtgtcgtcttgcctgtcagcgactgtcgcgattaggattagggttttattagtgacatgaatcagtgttcttttactgaactcagcagccttctttaatgatcatcttaaccattcaactctatttgtgtaaaaaaagagaatcccccacgtcatgtaactttatgtgcttccctcgctcctttttcctctccttctcattcaccctctattccttcttcttcttcttcttcttcttcttcttcttcttcatggctcctagtctaaagtgaactatactcgtggactatagtgcagatatatatagtgagaatctgataaatgtatagcttgtttattgcatagaccgtagtcatgattataatgaaggatctaactactgacacatatagttgaaccaaaaggagatagaaaatagaaaggagggaaatgcgatacagagcatgtacaagtgtgagggctaggcgatgcagagaaagggaaagatgggtaggttttgttgtgtacaagtagaaaaagaaggttggacaatggaaaggtcgatccggggacagaaattcacatcccaagtatgcaagttctgtgtctctgggattggaacttctattcccagaccgtaattccttctcaaaaggctactatcaccaaccaaagatctcaccaacactgagagtattccagcgcacaccgccgacggaaacgaccatcaagacaacttcgacaacaaccagtaccaccgagcccatcatgaagcgagggctgaagatgcggtagagcatgagatggcggcggagatggccggcccacatagtagtggcgagattgatagtcgccaggtagaggatatgggttccggcagcctgtacgacatcagagaggatgcgtgtagcggggttcttgttcgggtttgaagcggggacacggtcgtgggtctggaggggacgtttccaaaggacggttaaggggacggcgatggcagctaggatctgtgcgccgaaggtattgaggatgacgagtagtggggaccaggggtattggattgttgtgagggggatgaaggctgtttcccactggatgctggagagcgtagcctggtggcctgttttgaagtaatagaaagagccaaggacgccgaggatgacggggccgatggaggagttcgacatggttaggccgtttgtgtcgaggatctcgaggagagagaggatttgccagaggaggagcgcgatggcgccttggcccattggcttttgcatgaggatgacggcgagggcgaagttgattagtaggaagcagaagtgggttccgtagacattgccaaagccgaggattgtgactgttgttcgtgggccttgttgctggccggcgactataggggccggtgggctgttaggatcttccgtgggtttgctcacgttgatgctgacgcaaggcttggagtaaaggtatgctgcagtgcctgctgcgaacgcgagggcgaggacgaactgggctaggaagacgcgggcgaacttgagtgtttccttgctgacgggtagccactcgccgtcgtcggcgccttcgagaatccagaatatggaggcgacgaaaagaccgaagcggaaggcaaagccgatccatagagatgcgacgccttgataggacttggagccggcgtagtaggaccgcacgacgctgggcaggaaaagagtgaccaggaaaggaatggcaagctgccagggggcagaagtggaagaagtcgacgaagcgtagtacgtggagcggcagaagggcatttgttcttcacgacagaggcgggagaaagatgcgattcggcctaggatcacaaagagaatggagtgatatacccccaagatacggtctgtagtttgcttttgtcgcatggacgatataccggcgcacacagcgaatgtagtgaggaagaatagaagaatttcgtcttcccagatagtgtacgagttggaggcaaatccaatagactgagaaacggtgaagaaaagcgcgagccatccccacatgccattcggaagaggcagagtcatgttcgcaggcttcttgacgagagcgggcgtggctccaatgatgcttccagcggcggccagtagtacggccccatcgaccgtagatatctcggtcaggccagtcaaacccaatgcagaaccggccacggcaccgacgccagcgccgacgcttgcgaattgaagcagacgagacgtggcttgggttcgatctgtcttcaagcctcgggcatagatgatcaacaagataataccagcaaagagaatcacaacaccttggatcatgcttggcacatcgaatcgagcccacaatccacggcagatatcaagagtgtgacgctggtacttgcggtagagttcattgctagcctgagcagcggtcgacttggacgagaagcccttttgagcggacctccactcctcttctgcagcagtccaaagtaaagccgcctcttcatcatcaccagcacctctagcaatcgcatattggtgctgatatctcttgacttgtgctgcagtcaaccggttgacagtcgctagatttgcccagttgttcccacgtgcgccacagaaagcctcttcaataggcgatcctaggttattgaatgggatgggcattccaaggagtaaagacaacgtcggaacgaggtcgatctgaggcacgaatctgtcgcgcgcgaattgaggcgggagaagcgtatccttccttgtgcgtccgaagatgccgcgcttggagtacatccacaacgcggcctcaacctcgtcatcagactcaccgccgtggtcgcctttgatgtccatcccatgatctcccatgatgaccagaagagtgttatcatcaagcgcagcaatgatatcgcgaatgacacggtccatttcctgaagcttggatgccatggcagcatgattaggaccatatcgatgacctgcatgatctacgccgagataatggccaaagataacatcccatttattcctgttctcgggctggagaagcgggaagagatgctccgtgacgccattgtcgacggtatgcaagtcccagacgttgaatgagtcatacgcatgcgtgagattggtatcaaagtagcccgggaagagcgcctgccaggtatcgtcgccgaggtgaaccaggttcttcccggcgctatgcaactgtgcgacaagattgtcctcgtcgatggcggttccggcgaagttggagcctgcgtcgaggaaggtgggcagggttccggtggtcaagcctttcagacggttcagggttgttgtcggaggatcggcaatgaatggcaggaggaaggcgttggcggggttttgcactgcggtctcgtagaggacagggatgttattgtggaagaggtgggctgtatcactctctcccttcggggcgaatggcacagtgaaatcataacgaagagcgtcgattatgatgacaacggccttgtcaaatgtcttctcgtgccagcagcctttctgctgtttactccctagggctgtagtatgttgggctaaagtgtcctcgaaaggcagtatgtcgcatgatgatttgttctcaaggaccatgcgcgtgaggagaaacccttttgtgaagagataaataccggcgacatgcaaaagtctgtcattaaccagcgtcagttcacatttattttttaacacttcaacccggcagcgggccttaaacctcgagctctgctaggcctaggcggaaccactcacaatatccacgccagaacacccatcacaccaaaatgcttaaccttaaactcatcttcaagctccagcgccttctgatccaacaggccagcttgcttcagcttggactgcccgccagacgatttctcggagctgcgaggggaggcagctggaagaccgcttttaggactgctgggatttggagtccccatagtccctgcgggtcgcgtgaccatttctaaggtctattgtattgtcgcgggtcgaagtcggggccagctggcgcaccaggtcgcagatctggcttttggaggccgaaagggcaccgaaggaaccgtgaatgatgagccacggtgtgttttaggcgacagggaagccgggagcaagcacaaatgatccggttgaatcggttcaagcgagaaccctcgaagtagggtaaaaagtataggcgggggggcggaggagatggcggattctgtgctctgtcgaacggcttccctctgtatcaagaaactatatcatgcacattgtttggaggagcaatgtataccaagcgcaaataatagggggaaagctgtgtaagtaaagagaataattctaatttccctgacagtcgcggaacccacgggttggggaactcggcctcggcgtttctcattggccggctggcagcggatacaactacatagtacaccacactatactgtatacaggagaagagagagatatctggggaaaggatagattccagatttgcctaaatgtcacgaaacataggagggctaagtacatacattatccagctgccgggtaccgaaaaaaggcacatgagaaggaaagtaaaatagagggtccctcaaacgtaaaaataggagcctcataaaggggggtgaagaagagaaagtcaaaagcatgaatagtcacaaatatatcgggccctaggaacatagcagggacgaaaggtacatgaggagccaggcttaagaagtcaaacgccagaagagaaaaaatcggcaggccctcgctacgaacgatccagtttcaatgaatattggaatccaagcagtgtgagctacccatgagtctgtccagaaaccgggtattccgacggtgtgcttttgagaccaaaatagaaactgaagggcatatgtgcaagccatataggccaaatcggaaaggagagatatgtaaaaggtgaaatcgcaaaaaatatttgccagggtactcgtcatgctttgagaggtcgttgaaggtttgagagagattgagcgctatgcgggtgggatacgcagtcggtcaattgggccagtcggtttgacacgcctttaatggtatgtcttcgtctcctctttctccctcagtccacccatccgctcgatgtccagggactggaagcgaccggtgtctgtgctttggtagggcggaagatcctcatggcacggttccaagccgatgctgcccgcgtcactgatgcggaccacgaccacgcggccagaggtgcgtttgccgcttgcatcctcttcttctgggaaggtaatgcggatctcaggcacagggctcggtggggggctgtcggagttgtccatgaggctgcgtttctcatcatagacaagaatggagtcggttttattcgtcgaaatggttaggcggcgcctgttgggtgactctccattgtagactgggagcaagtttttgttccgagactggcgcttgcggcggaggatgagcaggccaccgaccagggcgagggagagcagaacgagaaccaggagagcaatgagtaggtctaccatggcgtttgagagtccgccattgctatcatcgcgagcaacaatgcgggggaatagattgttcatcttgttgattgtcgattgtggattgtcggttgtggggtgtcggttgtcgatggttggattttcgatgccgagtttgagaattgtatgattggaagtcgacagctatgtatcgtgatcgtcgatttcaaattccaaggaaggtctcggaattaatccggggaagtaaatactgatggaatgtgcgtgcaaatatcggtcacgggatcgtgtcgaaaaaaagggcgaagggtcgaaacgagagtgagtaggttaacgaaagaatggactgcaaggtgagccgctgaaagagtgaagctggcacctgcgaaggaaaagaatggaggggatgagatgagaatgaagggaaaacagaaaagggaggaaggggagaagaggagaaggttgcaagcctagaacggcttgctattgttagtgtcgagctaagctcttcgtggtttagcctggttccttgggcgttgctcggggcctcttggccgacaggggttagccaatcacaggcccccagtgcctggagaacgggccctccggggtcgatttgcgccctctcattcggtggctccactgaactatgccgattgtattttgattcccctgagatcctcatggacggcataaatctagggctatacgctgtgtatagattggatagatttagatcgcaaacacaaacatcagtaaatgtttcgagacaaaaaagatagtcacgggtagtgcttattctggttgcacaagcgtgaatcactcggatttaggcgtacggtgcaatgtcacgagccctaattgtctaggtacatactacatagtgacatgatctgttctctggggggatcctcgtgcgaaaataacaggaaatgagtgtttcaaaaatatgtggagagatcatgatctcatgcacctgatcttcgagacataaacaaagcccttgtttgcgtcaaccaaccacaacaagtaaagaagtaaatcgcagctattgtttgttggaaataaacaaaagaagtaaggaacaaattgttcattttgaaaaagtggacttattatatcatatagacaaagttgacttagtcgaactatgcaaagatgccagagatatatttctctttcgctactcgacatactcggtacgctcgccttagatcacatgaaatcaagcaaccgagacagaactggacgcgtgattttaaatatatctaggtaactcatgaacaaacctttctgagtactcgaaggtttcattgaagtccaaacatttacatccatactcgaatcgaggtaggagatgagatcgttgatctctgtttcatagattggtgtttgcactgtttgcagaagtggataactacaactaggtatcccacttcttacttcctgcttccccatctgttattttttaattaaagacctggcttgtcacaatgagctgtttccaagttaaattgagcaagctcgtgtgaagatattctcgatgccgacccaacgcttagcccaaaccacaaagtggggttcggaggctcgtctcacctcacgtgcccaagctgaggatagtttgacagactacaacggagagacacactgatcgatataccgaaaagcaaattcacacggtcggccgcgctatgtcgtgcaattttgactgctcggctcccacccccttatccccaaacagcgatatcactgggattggggtatgagtttccctttctctcggccgcggacgcatctcacactcttagatcattatcaacaatatcgtgactaccggcatcgctgtagtgatcatttcaatttactacttcactgcctacgatcccatccgcgacctgcctcatgatggtcaaactccgtttcgacccaacccagtggacgtatcctctttagcattgttcaaatcatacctaagccctttcgtcaaaattgctaggagcaaaagatttgcgaatgtcctaatcaaggtgggtggattcttatgagatcggatcggtgaatcatcaaagtaacttcgaaaaacagtgcatccgagcaatgagcgatatgcaaatcatgacaggctttttcctcctgatcagcgggtattcccagctcaaatgcggcctggcaacctatcattggctagtcgttgttgaccaggcctggctttcctgcctagtccagttatcctgcttaacgcacctacgcagttatttccacaaccgccctatcgagcggacattacggttactagcagccggtgtatcttcgataatgttgatcgtggggcttagtttcacgggaaactacgattgggcctttaacgcagatagtagcgatcctgatcacccgacgattagtgaccctgcaatctgttatatgcgcgctcgtccggcgatgaattcggcctttttttcgatgcctttctcgataattttgattatctttggatttgcttcgagggtgattaacctctacgatacgctttcagttagcgttgttagagctagaacttcccttgcaggacatatacgagggttattacgcattgtgtataactggagccgggcgtctcgctcgccacgaagtctgaaattgacacttggatatctccccctcttagctctatacctcacggggtctgtgtttgtggatgtgtgggattccgctgctatagaggtcagatattatctatgggacgtgtgttgattgtattctatgttctctaactcgatactaggtcgtctggttaatcatcgcctttgcattcggtatcacccgagtgataggaataatacatcgaccggaaaagatgggcctcgacgcttcgttgactagtttcaatgattggtcgtttggccaagttggtgctatggtggtactagccgcaccgcttatcacactcatcgggttgttctacgagggtgagtcaaaccatgattatcgtctagaatcaactgagatctaacactcgtgtagaagacgagactcgtgtacaggatgaggaacctctctccgacagccaaaccgcaccaccgccggaactcccggccccttctatatcaaacgtaatcacggacctcaatgatcccttcaaggattggatctcgcactctcaaatattctatctggtcgacggacatatattcacaatgctcataagtgttttcttctggatggcagagcgtgatcctttcggcaagataaagaagacattattagaggatattctcgtctcctcgggtatcaagatggttgtacccattcttttctctttgatggtggagactatctttgcggaagctggccctactagtatttcttacaaccttgcgcaagttgtggtaaagctgcacagcctgagctgcctgacgtttttcagtgtctccagttctacgaagattacttattgtctcctgcctatccttgttatctgggctttggcgcatcgcttctatcccttttttcaagctttattctcgtcgaagttgctggcctttctgcggttgtcatgacattaattacactatgatctttccaaatgttgtttccccatgctctggtcctccctcggttttatttgatccatccacattccatgcctcttcgcactacaaacgagagaattagagtgattccccgtttttgagagcggagcgacatcattcacagctgcatagctcacctaccccgtccgatccctctatcgccatgaacggatcgcgactcacgatatctctcgggagagttcacgaacaacatagaagctattgaagccaagaatttacttcaattcttaacttatgtacagaattggtgtgccactggtgtgcggttggtgtatgcaattgaatcaaataacatattccaaaatagtacacgcagtccgggtaccacaaataaagtacctagttccagtgtgagtacttggtgcatggtctaattactggttaaatggtgttagaagagctatttcttcatcatacatagagtgcatctggacatggtcttggagcgacaggtgtttagtgtacctttgaacccttcttcagctaacactaatattatatgttgatttccaaaatatgatctgatcaatagtatgtattttaaatgcatgaatggagatcagcatgtatatatctggcttaggcgatgtcagtcaaagctaaccttcgaagtcttaccctgccagaaatcccccacagtcggcgaccaccaaactccccggccttttgtcgacactgccaagaccgacactcgagatcaagaacacaaccaacaccacgtcgctactaaaagttgtcaactgcaccgactgacatctcctacgttatccttggcatacagtgtaggcagactccgcacgtttgctatgcggtcaggggtcgccaacacacaattcgacacctcacaaacccggagaaaggacgatcacgatcatcacaaatggtaacacggccaacgctcatgaacgctgcatattctatgcaagccagcggtcatcgcgctcgggaccaccgagtatgcctaagcctacaggcgaaggacgcaaggcaggcaatgcccctcagaaatcaatccggggaaggtttctgcgagtgatggtctgacacttgacctgtgcgacccctgtgcaaggatccaaaggcgagtatccttgtcagtctctctctgccagtctatgtctcggcctttttccaatctcgccggggaaattacaccgcgatgactggataccgtacgtcggcaaatgtccaacacatgtttgatgacgaccgttcttctttctcatttctctgctgggtattctatgggcttctgaaccggacagtaagcatttagttctcgtcattcaacaggctgcattgccaaattcgcccacagattgatctaagggtcagtgtgacgatgcgccgaagcaaggggctggccgagtctacggaagtctacccagttgagaccctatttccgcggataatatttatggatctgacacttttcatagcgtgaagcatacttctatggtcgcgcgcgagactattgcaccactcgcagttggggtttggctcattgatctattgagagtcagaatcaagggatcgaagggcaatcccaataccagcgcacggccgaaaaacagatggaacataaacacgaaaaaaagaaaggaaaaaaaggcaagacgaaacaaaacccccctccctccattgggttcctgaccaggcggagaaagtaagccaacgagagagacgccttgccaatcctggaatggtaggtaatccgcaggtaatccacagttagaaaggtggcggcccttggctctttttggtcaagaatgtttccggatccaaccggacgttatacgagatgtttaaagcaagagtactgaatatgtagggcataggcatatatggggtgtaccttacttgcggttaagactaaggtgggaggggcttagtgggcccgatcctccagaaaccttcaatcttttaagataagccgagaattatattaagccttagcttcatttcgggacgaataaggtagaatcccggccgtgaagctggattccttcctgattctttctagcgaaaagtttcttgtctatattagacgttaccggctccattcgggagtatgatctgtcttttataggggttccatggtccatggtcaacacatataggtgttctctagtggagtggtgaggaacttttagccgaagtgtttaatttcccccatggtgacttcagagttgctcgttcacgtctattacatgtcctatttggtagtattccagggactgtttgttgatgtactgacttggaccatgggagatgatgtgagtagttacctaatagggcagtataggaaaggttgagtgtagagtgtatagagagatagaattgcaatagaatatgcaatgcaatgtgttccaatagcagtgtgtatgtatacaatccctatatacatcctctcatgcacatccagatatcacgatgtagaaacaagacaaagagatggggccgggctaaaaagaagcgccgggaggtagatcgcggtgacggtcagatacatgcgccataaacccaaatggctgcaaagatacctgggtgcacagccaaactctaacctaaacgcaagtaccaccatatcgcatgccggatcgccttcttcatatggtcatggtattacgcggcaatacagcggctgatcggcctgagcagtcatccagcttcttgttatctatccaattgactcttgtcctgtcactttttcttcctttcttttcttttccttcgtgtgactcttgcttgaattcgtccttttattccatctgtctgctccctttttttctgatcttttcttttttttccatccatcaccgcctcaccgtcatccactcccccaggacagccacacacaaaaaaaacccttgggctgtcatgctggcgcctgtgtgacagctggactacattaatgccgtgccttgtctctcgtccacattcccttccatcgatccactgaagcccggattctcatccttcttgcgcgagcgcattccattatcctctcttagttccgcctactcgaaaatcttcccccctcagacatccaaccaccccttgcctacgccaatcaatctagggtcccccaacgttctgattgccattctcggggatcgcctctccataaggcacatgaggacgatctgcacactgggagattcctggagcatgcacggagcagagtaacgtcgcggcgcctcctcaattctgaactttccggctaccaacttgcgaccccacagctgcagcaaacgaaagggtgataataatcgttccaattctttgtcaccttgcatcttctatcgctgtcaggctcgatcgaccttcctgccaccttcaacatttctcgcctcatccagagctcgttgctcttcctcccttccgtctcccttctcttgctcctgtataatctgtacatgtcctgggttcgccgttgaacaatacagaggacaacgttcgttttctcccatttcgctctttcttgtgatcccttctatcccctcttttggtgagctttcccttccagacacctgggcaccctagctgcctggatgcccttggacctttctccacaccttgcaacgtttccccagatggcccagaccctgctaacacgggcctcttctcatcgcagtcttatattccttcgtgtacgccgtctctggtgcctggtgcccgtttgcaaatactagtcgacacagcatcggccgatcgtctcagctctgtgatttattactacgagacaacactccgaaaaaaataatcgtttgccgttcgggtacatatcgaattactcttctgccgatcggagatttcctgggatggcttctaccatggccgcgaatgcaaccagcgtacacaacgtgagtgaaacacatgggtgtggatcaatggaatgtcgataataacatcgagtctaggcacgatcgaacagagcgtccaacatgggttcatccgggatgaacgaccgcaaccgcagctcacaaagcaacagtgtcggtaaaggtttcggtgctagtaagactagctggaagaacaacatctggggtgactccaacctaggagggttcggagatggtgagtaattcgtacaccaattgcgacttgggctgtgctgacaaattttgcagaacaacacctcggcgagactgcattcgaaggaaaatctggatctggttcccttctctctacatcagagtcagacggctggtcgggacgtgccaacctgccttggagcactgtcaacaccaacccctccttccagaatagaggccttgccacatcccccacccagattcgtgcaaatgaccgcagtgctcctgctctcaacgaagctagtgatggctcttacttcgctctacctcgcaccactgggaccgcgagccagcgcccctacctcaacactagttcggagggtgtatctccatccggagaaggcctcaccttcggaggatttactggtcgacgacagatgaactcaaccggtctcggtggtagccctgtgggagcgactttccctgtgaagcctggattctcgaaccctctcgatgctggaagcggagatggaatgggtacttcaatgggcatgccatcgttgggatctggaattgccgagcacatctctccaacacagggccgcagcggcctatcacacgcgtctcacaactccgcctcttacactactcaacgacccactcactcagctcatccttccttctactccgacaatcacagcatcgatggccgctacagcggtggctccatggacctcaacgccagctttaacaagctacagctcaacgaagctaactatgcctcccaaggggcccagcgaccctcgtttattccccatgcttcctttgatggctccttcccgcgcggaaagtatcagaacaacgaagacacttaccaggcactgggatacaccgcagaggctgcgcaggagatgcaccttgcttaccaggcacgaaccagagctgcgaacaccggctccatctcaccctccgactatgcccgcatggatagccccatctatcccggcgtggacgggggtgctcagtatcgcaatgcagctccgagtgaaagccaagtggcagcctttgagcgcagactccgaaacttccaggagcaggagcttgcccaaggttcctcgcgattgcagtaccctccttctttcgacttccaagcataccaggcttctcgcatgaatgcaatctctggattctacccagtaggtcatcttagtggcctcggtgccgctgctctggtctcacgcactcaacgcgagcacgatcctacccaggttgtgcgcagccctctcctagaagagttcagggccaatagcaagggcaacaagcgctacgagttgaaggacatctacaaccatgtggtcgagttcagtggtgaccagcacggctctcgcttcattcaacagaagcttgagaccgcgaacagtgacgagaaggagcaggtgttccgggagatccagcccaactgccttcagttgatgaccgatgtcttcggcaactacgtcgtgcagaaattgttcgagcatggaaaccagactcagaagaagattttggccaaccagatgcgcggccatgttctggccctgtcgactcagatgtatggatgccgagtggtccagaaggccctggaacacatcctcactgaccagcaagctgtgatggtcaaggaactggagaaccatgtcctcaagtgtgttcgtgatcagaacggcaaccatgtcatccagaaggccattgagcgtgtcccttcggagcatgtccagttcatcatcaatgcgttccgcggtcaggtcaacagactggctgcccatccttatggctgccgtgtcattcagagaatgcttgagcactgccaggaggtcgaccgccagtccattctggccgagcttcatgcctgcacttccaatctgatccctgatcagttcggcaactatgtcatccagcatgttatcgagaacggcgacgagaaggaccgtactcgcatgattgacatcgttatgggacagctcctggcgtactccaagcacaagtttgctagcaacgtggttgagaagagcattgagttcggtgcagaacatgagcgtatccacatcatcagtactctcacctcttcgaacgaccgcggcgagagccctctccttggtctcatgcgtgaccagtatggcaattatgtcatccgtaagttcaataccatcattttttgcgtgctatgctaacccccaacagaaaaagtcttgggccaattgaaggatgccgaacgtgaagctctcatcgaccagatcaagccccttctcagccagctcaagaagttcagctatggaaagcagattgtcgcgatcgagaagctcatttttgaccccaactctcctgcgaccgtccctctgtctcaccccacctctaccactcctccccactcccacaaatcctccccgcaacccgccaagcgctcaatcccgactactgagcagccccgggcgcctttcatgggcaacgctccacctactcctcccccgacggatgctcagaccaccgtcgatactaccctcgagtcgaagggcctcgccaagagcacggtgacctcggtttcgagtcccgagacaggcaacaccggtgttaccgtcccggtcgatgtcaccagtgctcattaattcgctgcacactttatcttgctcgcccaacataatctttctaatgctgatttgatctgagccgagtgacttcttgttctatctaatacggggcgtatacatacaggggaatcaggcgggatatatgttaccaacgtctatgtgattctcccctttgaccatgctttgacggcgcaacaatgagggcctggaatgtctttatttctttctttttctttcttgtgttgatctcgacctcgatctcggaccgccgacttatttcttatcttactttatttgttcttgtttctttcttgacatgttcatttattcttatgattgtctttgtgaatcattgtcaattcttcttgctacgaaatccaggtccggcaatcgatatggctccggcgtctatgttctttccacttcttccatttttatcttgttacggggttaaggcggctgtgatgggggaaaaccggcaacggaaatgggaacgatctttcgctcttcatgtcttccgaccgcatatgccatagcatggagtctggaccatccatattcacattcgggtccagcagaaaataccacgaaaagaatcaaatcaaccactttgcacatcagctaccttgtccatggcatctgcatgatctactcagagccacttgttactatttcttcactggccgagcaacatatttagtcatggccatgattctcaattacgagatccgcgactttcctttccgtatcaaggtgttcttatcaaaggcgtttctacgcttctcggtcagcatggaccattctgcttggctttgggggcttgtcataactcccagctcttgtggatttcatgcttgttttcgggttgccctgttgagaatttctctcgtggttttcttttcttcctcttgctagtggctgtgtatcatcaatgcattatgacttgacttttaaattgcttcagtatcattgagaatgattcgtaccaattcgctcatgcatcgtagcatcctagcatttagtacaagcccgaatgtgaagtattgtggtacgtagtggccactcggaactcgatcgttctaaaaggtattctaaagtgtattctagtacatttaaacagaacctaaaaccgagtcactgtgcactgcgatagttgacctatacagaaccatatcacacgtgactcccgtcccgtgatgcccgataagacgatgcattttgatagagttggagcaaaccctcaacatttccagtgaccagcattgtttttctgcgcgtcatcggatgaaaccttcagcaccaaccaatccacccatcattgctgaaatccgaatccgagctcgaaagaacctccatccagagtcggcatctagaccagctccaagctctcatccattccgcaaaaccataactacaaacctccaacaataatcaccaccacaaaagccacacacaatcacctaccgaagaatccaaatctcctacttaaactccactacttattctcccaacccaccaatcaccaccacaaaatgtcctccaacgtcggcctcacaaccccgcgcggcagcggcacatcaggctacgtgcagcgcaacacagccctcctcaaaccccgcaacaacggctacggcgccccatacccgcccatcagcggcgcaaacggcagcgggcccatggaccgaccgttcaagcagcgcgtaccggacaagcagatcctggagcacgaccgcaagcgcgcgatcgaggtgaaggtgatggaagagcgggagcgactggaagaggagaacgagcggattgaagaggaggcgggggataagaagaagaaggggaagggtgggcatgatggcgagggggagaaggagaaggagaaggttcttactgaagaggagattgatgagcgatgtgatacgcttcggcagcggttgctgaaggagcttgaggaggacttgaagcgtgcggagtcgggcttcaagaagcctttctctggctctggggctggggctggtagggacaggcgcaattttaagtcttatcaggttcatgagcttgctgaggcgaagattgaggagacggagaggttgcgcaaggcttttgggttgagggaggatcgggagactggggagatttcgagttctcgtgattatcgggagaagaggagggattagatttgttcttttctctgcttggttctgcggtttgcgtttttttcttctcaagtaatggttggtgttgatcggtgttagggttatgggattatcatggaaatagggttgcatgaacaagtttctttctttttattgttgtccatgttatgctgtacaatcttcgaatgcaaagaattgaacaattggatatcataacctcatatataatacaccaaaccagtacctatgccacaaacttttcaataacccaaccctccttcgggtccttcttctgcacaaccttcttagcaggcatcggccaccccacactccccgaatcacccaccaaagcaggaataacccagcaagatctgcgcggcggcacaccgtcaatagcatcagccttaccaatcggctttccatactcaataagcggcgtaccatgcgcaatcgccgagagctgcaagccactgggcgcaacaagcgggaacattctaatcttaggaacctggtcagagaccagtgaagcagaagactgctgcagatgcgagtaagtgatatactgtggcatttccttcggcgagagcttagctagcagcgaagacggatgcacatagacagcgcgttcctccaggtcctggcccttaccgtcgcgggagcggaagagcgtcaggtaagggacgtctatggcgcgacggggcgcacgcgggttctccggcgggacgggggcgagatcagcgcggatagcgacatggtcgatgaagcctgctgtgacgatctgcttgagggccttgatttgctttggtgagggctctggcagacgggcttcgtaggcggggacgacgcctgggttgtttgagcgcacgatgtcggttagctggcggcggagctgggttgcttctttgaaggcctttgagcggaggaacattttttcgcagaaggcgtcgccgtcggaggcgtagccgtaggcgcagattgctgagagggattttagcgcgtctgaggtgtcgtcgtgtttgctgaagaggcgttgggcgcgggcgtatgctttggtgcgctgttcgcgctcgtcgtcttcgagacgatctgcgtttgtgtagaccttgcgtctgtcgctgtcgctgtcactgtcgtcgttgactggcttcttggctgtggtgggaagggggttgttggggtcgagctgattctcttggacgaagaggtcgccgactgctagggctgcgactagggcgatcacgtagggcatgcagccgtgttggtggccgatgtggagcattttgctgaatcggggagagagggggtatgtcgagagacgacggccgatgggcgttacctggccgtcggctgtgagggccccgaggttcttcagcagtttctctgcctttgcgagaccttggcggctcggtggtgtggggaatgggaaattgatcacgttgtgaagacccatgcttttcatctggaggacaacgccttcgatgggcgtgcggagaatctctggctcggtgtattcagcgaactcgctttcatagaccgcagatgagtacattcggtaacagtggccaggccctgttcgaccggctcgaccggctcgctggcttgcgcttgccttgctgatccagccgacctggaaactttgcactccagtgaagagatcgaactgcttctccttggcgcgaccgcagtcaaagacatacttgataccggggatggtaagagatgtctcggcgacgttggttgcgaggatgatcagccgggagttctctgggggcggctcgaataccttcatctgctccttcgtgggaagttgggagtatagaggcaaaacgtgaacgcgagttgacgagtccatggcctcttcgccttcggcaagttcgaagccttcgtcttcctctgcgtcatccagtccggtgatctccatgtcactgtcgtaatcgtcatgtccaggattatccatctcggtgccgcccagctcaaggtcctctgcttccagaggtgcttcagtagctgagagttgcacctttgcctgtgtcgtgtcttcccgctgagtaggtttgaacgcctgcttcagccgcttagaaagctgccggatttcgttctgaccagtcagaaagacaagcattccaccggcaggtagtttgcggtgtccacgcgagaccttgcggaacgcatcctcaacataatcacgctgggtgcggcgggagaaatgaaccgcaacagggtattggcgaccctcggcttgaaccaaggggggtgcaccattgcggaaaagacttgggttttcagtgaaatccgaaatacggagagtggctgacatgatgacgaccttcaaaggcttgacagacgggtcctcctcgctcaaagacttgcgcaggcccacaatacggctgaccattccaatcaggatatcagtgttgacgctgcgctcgtgagcctcatcaataagaatgatagagtatttgcgaagggcaaagtcatctgcaatctcccgtagaagaataccatcagtcatgaacttgatggctgtcttcttcgatgccgtagactcgaatcggatttgataagacactttctcgccatgttgacccaattcctgggcaacgcggttcgccatactcacggctgcgactcggcgaggctgggtgacaccaattagacccggattagggctgtctggggagccgaagccagattcgaaaaggaactggggaagctgtgtggtctttccactaccagtagcaccccaaatgacgacaaccgagttgttgtgaattgcctccataatcttttgttcttcgccaacaacggggagtcctagacgggcggtttggatttcctccgtgcggttgaccgcgacactgtatgccttccgattaggatcgccatgagttacctgaagctcccgagggaggggttcttcttgggtagtattgtgggttgctggcaacttagatgggtcaaacacctgcacttcctcggtcacggctccctcgttgggtttgaagcctgcggcttcgttgatttgttgtaccgcccaagatttaaaggctgactggcgagtcttgagcgttggcttatccacctcgtcatcattttctgagtcttctgagtcttctgagtcttctgagtcttcatcctcatcctcatcctcagaaatgccctcggaggacgaagtatcttcctcttcagaaccctcttcaatatcactttcggactcgtccatatcgtcctcatcttcgtcttcatcctcctcacccgaatcaaagccctcccatgcgacctcagcttttaccggtgcaggtgcgggtttcttcttcggtgcgcgcttccgcttctttagaacagggaatccatcagctcctagctctaatggtcgtttaagtccacttccagcagcagcctcttctcgtaatttttgttcattgggatctgttgcgggatcggaaactttcaggtggatgtccgaatcgtcggagtcatatcctgagatatctgcggaagcattgtgtttcggcgcggatacggctcgcgatgtagatacgtcgtcatcctgtctcttgcgcttgtggagatctttggaactctgtaaagccgaagtgtccacagacgattgagcaagtttcttcaacaattcgatattttcttccttcctgagtttgttttcctgcaggtatgttagagccatatctttctattccaggccatccacatacaatatatttgtccaagcgcttctgcttctttgaggacatctgaggatgctgctcttgtagctctcccttcagcttctgtcgccgtgcctctttctcatccttcgaaacgggctggagctgtgcgacattggtatcagccgactcgccgtctgggttttgccggtgcctttgttttctaagacgtggtgtaaatttaggtggcatcttggggtactgcagccactccggctgagaaaaaaaagtaaattgactaagtatgtaagctctgcgatccaactatctcttcatcgaaaaaaaattagggcggtcggatattgctggttcggaccgaggcggtgaaactagccaccgcctacgagatacacctagttaagcccctcattctttagtttctcttcagtatttcgataaagataaataattcaaatcaccatggctggatcttttgatacaagctctctgcaggattccctcaacctgccatttcctgctaccactaagcaggtggcggggttagtcaatggtgtacaaacagatgtgatgataatgagctttagcgataaaatcatggtcacaatttcacaagcaggacgactagcgcactgggtatgtcttgcccttgctttcagaaaacatcgctaattgtatatagttgcatgtaccaatggagaatcagaacccaggcactgagggcatgcacactctcgctgagggcgatgatgctctgttgccccttaaaagtctaaccaccaccactttattaggtggctattctcctggacaagatacgacgggccaactacttgctcgtcagattgctacagctattgcaatgaaaacacctagtgaaaagagactactcctcgttggccttggacttggcaaatcaactgctgatagagattcattcttcgctattgttgacctggttctgcaatgtctatgaactgagcatagatcgatctctgactgagaacaaagcagccctcagaacgaggcatgcgccagacgtcgggcgcgcttcagaaactgttccaggccctcatttgtgatctctccgtgaattcgaatgcgctcaacttcaatgaatgcgccgcacatcaacaagtccgccaggtcgacctcattcatctggcccccagctgtccagttcttcctcaattcgacgatcagcgtgcggacggcgaggaatccatcagttttatgccgggtgatgaacttcagaaattggcgagtgcgcttctcggctttctcggggtcgttgtcaccaagcgcgattttgattgctcgacaccggactgtcgacaggtgtcgcaacactgggcaaggtgggtcaaggtacgcgtatctggcgaaatccatcaacaccagagtccgattgctcagcgcattgatccatgcgaaccacgcctctgacatccagttgtacgatacaaatcgcatgcaagtcggaatctttgggaccatcccatccttcttgagaaagacgggctcctggcagtcgtcgaaagcgtacttccaaatctttgcgcgaatctccagcggcagccaattgaatgggcacgggctccgtctatccacgatcacctccgggggaaatattctcatgtcggcgaggaaccttttctcgaatgattcccactttgcgccaaacagcaaccagacccttcccttgaacttatcatcggcacgacgggtgatgaagaaaagtggtgtatcggaactagtactttgttagatcaaatggacttggtggcatcgtgcccatagaattgtatcgcttactatgcatacggcatcctctttggtctcgggactacctccacttggtcagactgatgcagaaccgccgaagccgctggacgtggggcttttgaaaccggggcctttgaagctcgaacctttgaaactcgaagcattgaaatcgggaccttcgaaatagggaccttcgacagtggggcctcgaaaactggagtctccgaagcggaggcctccgagaccgggacctctgaagcttgaatctctgaagccgggacttgcgaagccggggccttcaaagctggggtctccgaagctggggtctcaggaaccgggtcctctgaagcttgaacctttgaagccgggacctccaaagctggggcctctaaagctagagcccccgaagttggggcatccgaagatatcgctttgtcagaatcgcgcttggccgaaatccttcctcggatacgctcacgcacggccgaaacctttccttggatgcgctcacgggtgcccgaagcacccgcttggatgcgacgaacagttttcttcattctgttcactaagtggtggccatgcgtgatgaaggagtgagatgtgacaaaggagtgagatgggataaagaagcaagatgagataaaggagcgagatgggatgagagtgagatgggatgaaggagcgtgaggggaaggatcctgatgggatggtgtcgccggcgacccaacgaggcacacgctcggcgcttcccccactactatcgtcatgtctgcctgcatcttatgacttgagtgtttatagacgccatgactgctttgatttagagaactcctagtggtcaattacccgtatatacttgttcggagttaggtctatttcggtattattctgtgaatcggaattgtttaaggctatctatcaagagtgatcatcatacaccggtctaaaaacgtagaagatgatggcattttgaatatcaaatcagttttcttcctatgaagtgattgtaggctatgactagcagagatacatttgatattacggtatggccagtcacgtggtagatattgacaaacaggggagacgacatctgtaggtccgacgtgaacagatgagttttggggctggcacaatcataatcccctagtcatctaaaccttcgtctgctggttttgatattccttttagtgtatacattctgcatcctcacatttgaaggtcttcttagatttcatactccacacatcaaacattctatttttatctgccgcccgcatcatttgaatcctttatcttcatctatttcttttcaaaatcctgcgtttcggtgtctgtaaagttctgcataatggagccacaagtggatcctgagttaaccgctgccatcgaggcctctcgccaagatatgtatcgccagcagaacaggcgagcgtcccaggataattttgtggatctcaccaatgactcaggtgatgactcggacattgaggaggtattccccaaatcaaagtctgtcgttagttccgagaccgaagatggcgaagagcacgagcagctgcaacgcgcccttgctatgtcgatggagcaggatgcacaatctcccaaacatgctactgccccgcatgaggtctctgcagcgtcgacgggttcaattttgggcatgaaccgaaagcagatggaggaggagcgtcttgcacgtctggccaagcgcaagaccgacaactctttgtctgagagcaaggttgatgatactacgtctaaacgtaaggccaatgacacttcatctaagcgcaaggccgacgatacttcgtcgactccgccatctccagttagccggaagcttcctaggactgagcctttgccagcccgtcactctgtcgctctagccaacccgtttcaagatgctccccaggcaagcacggctcgagtgagatctcaagtctgtcgccagcttgcaacaaatgccccgaatgttgacatccaaccgacctcctgctcagtggcccaatggcctcttggagctgtcaaaaaaacacatatcgccggcttccctcgcagtggaaatgacattacaattgaagaagttattcagcgaggagacttggagttgggcgtatttagctcatttatgtgggacattccgtggctttgttccaagtttaacaatttaaccacacgaatcatctttgtcatgcaagcaaatgacgaagaaacggttagcaacacactatgatcttgaatgatacgggctaacgtgacttcgcttacagcgagagcaataccgccaggacgttagccacatgcccaattttcgcctgtgtttcccgccaatggagccacaggtaatctgtatgcattctaaactgcttctgatgtttcaccctggatatcttcgcatcgcagtcccctccgccaatctcactcccactgactggggagaggataggctcatggaaaacgtatgtggctacattcgcctgatgttcatggattttctaacagtgtgcagactgttttccttattgatctgcctaagctcgaagttcctggtgctggaaagaccccattctacaaagaactagtctacttcctccaggccgaggaactccaccgcaacatcatcaagaggctagatgagtttgacttcagcgagacgaagcgctatgcctttgttcatgcagtgtatgtattatctccctgggtgattcccctggcaaaaaccagcaaccagctaacaatctaagtggcggaacaagcaccgaagacaactggaaacgtactggagttagcggtttgggtcgtgctgtcaaagctctcggcctggagacaaacgcgcccattaacgtcgactatatcgtaagttttacctgctatgccttcatataatacaatactgggtatactaacaacattcaggcctcatcgctgggaaatatcaacattccattcctgcgctccatctacctcgcttgcaaaggtatgtcaccatttagtaaagcccagacgaactaatccaactaactgcaaactgctaggtgacaacgctctactagagtacgagctccgaaccgcaaacaagaaaaaggaaccccgtacagaagtggaagcgattaaccgagaatgtctcgaccacttccgtatctacttcccatcagaccagaccgttcgagccgtgcacagcaatcccaaatactctatcggcacgatatgtctcaatccagcctggtggtcgggtgccaatttcccgcgggacaaagttcgagactgtgtgagcgagcgcggagtcttgatgcataacaaggtgagtacttccgcggtgccagactagtatatcgattttttactaatacacaatccttccgacatatagattgcctttgtccacccttccaccccgatcgatatgcccgataataaggagtgccgggggtgggcttatgtggggagtgcgaatttgtcagagagtgcatggtgcgtacatatctatactccactcgctgtaatgacaaaactaacatgaaccaggggtcgtatcgtcaaggataccaagacgaaacagctgaagataagctgtcgcaactgggaatgcggtgttatcgtgcccatcatcaatgagaagaagactggggagaaagataagggaccggaaacgcatggaaccgccccttcggcttctctcccagtcgagatctttacggataccgttccagttccgattaaagtgcccgctgtcccattgtccgagcacaggaagcctttcttctttggagtttgattcaacctgggatcttgagattgcctttgtttactctacatctgagtcagatcgatgtctacatctgcaagtccagtgagaatctgattttactaatcttggcatgggtatctgggataggagttcggatcgggttacttggttggttcaatgaaacgaatgaatggcaagggagttgaaagctgtatgtattatctagcctttatgctgtgatattcaacgagagcaaacgagagaaacagtgaatgtcctaaaaagcaaagttgtatgattcaatctatgtaatatgtatgtttctaacccaacctgttccgatatatctattatgacgctctatgtaaatgcatggtgacaaaaagaaaagtaaacaaaagaacaatttccaaacttttcaagcctagttctcactcttcttccccttgaacaaccccgtcacgcgatcagtcatcagtccagcaaaaccaaacagcgaagcaagaccaaagctccagcctttcacacgaacggtgtagataaagaaataaaccaaagcccagttaataataacataagcaaggaaaatgccaaagcagcgccacttatccccgatatgaacattcaagttggccatatactgcgcaccatccttgtagggacagtactgacagtcggccgtagcctgggggttaaccagatacccgaccttagcgaaagaatcgacaaagtcacccgcataagcatcacaggtctgtccaggaggggggttgaaatgggtagattccagcgaggcgcagtcaatctggacatctggcagaacagccgagagcacgccgcgcagccaccaggtaaccgggttgacgtagtacatccagtatttccagaagacggggtaagcggcgtagggacggacgataccgttgaagaggttgatcattgtgaagaagaaggggagggtgtttgagatgacggtgaaggagggcgcgaaggcgcagatccactggccccacgatgcctggaagaggaagaaaagcatggtcatgaggaagacgtagccggcgtttgaggagtcggtggggaatccgacggggtagtaccagagcagccagtagatcaggccggagatgatggctgcggggatctcgcagatgatgtttgcggtgcagaaggcgacccagccgtagatgcgggatgggtattcgcgtgcttcccagagggcgcggttgatgtagaatttggggacgatggagttgaggacgatgggcgggatgaggacgattaggaagacggagaacatgcggtcttgcattgaggctacggtgttggagagcatgtagaaggtgaagccgttgaagatgccgatgatgatggagacgaagagtttaccgtagtagtaggaggggtcgcgccagtagttcacgaagaggcgtttcgtgagctgggtggtttgggtcattgttgtggcggcgaattcgtaatgggcggaggcggattcctcgatggggagtttgctgcgctcggtgcggatgtgttcgatttcggcgagcacttcttggttttgctccgagttgcgccattcttcgttccagtcgactagttttccgtcgcggtgggttgctttggcggcggtttcgaggatgaactcggcaacgttctttgatggtgggcagacgaagccgcggtcaccgaagtacttgattatggaggagccgtctttgccgacgggaccgaaatagaaggtgttgccgccggggttgagggcgaggatcatgtcgaattgttggatgatcatggaggagggctggtggattgtgcagacgatggcctggccggcttggcaaagtttcttgaggaagcggacgatggagaatgcggcttgactgtcgagaccggaggtgggctcgtctaggaacagaagcagactaggcttggctgcgagctcgacaccaatggtcacgcgcttcttctgctcgacattgagacaaccgataatggcgtcctggatatcctcgagttcgagaagctcgatgatgcggtccacgtagtccattttctcctggcgcgggacatcgcggggctggcggagaatggctgagaactcaaaggcttcgcggatggtggaagtattgtcgtgtagatccatttgctcgcagaaacccgtgccacgctggaaatcagcacccagcttgtggccatcgacaagcatatcaccagtcacgacacccgtcttctggcgctgggccaaagtattgaggagagtcgtctttccagcaccagaggcacccatcagggcgatcataatgccgggcttggcgtaaccgttgacaccgttgaggagcttgcgtgttccgttgccgtaggggacagtgtattcaacattctgccaggtgaagcagcgctcacttgaggacagtcggttgaaagtggcaccatcatcaggagaggtctggccacgggcaagagcagcgttgtcttttgcgttgacgaccttctcttcatcgttgacggtgctggtctgggcagtgactttcttagcgcgcttggactttttgaagaccagagcaccgcccgcatctccaccaaatgagagagtctcggcagcgatgacagtcaccaggaggtacagtacggtgaaggcaatgacaacaccaaagttacgccatagatggctgcgtgtgaactcaaagttggcggtcaagtactgagctccggtaacagatgattcacccaattccgaacccgtcagagcacagccctggtggttggaatccaccccaggaccctgtgggacaagctgggatggattgcattgcatggtgcgatcggagaattcgtttgtcaagactgcctcgtaactgtacgcgatggggttgacatagaacagccatccgaaccagatcgagtccttgatcagagtctgcttgggaatgacataaccgacgaagataatgagcaggttcagcgcgataccaccgaaacgcaccgcgtcatcgatggtcggagacagcgcagcgaacatgcggtacatggaagtgatgcagaaggtattcgtgtacacgaacaggaagtagatgaagaacttggaagccgagacatcgagaccagtcatgaaatagacgataatcgtgaacgggacgaccatggagaagataaaagggaagtcgacaatgacgcgggcaatggagacagcagaggggcggtagaaagcgtaatccttgtggcgggcgacgataccacgtccagtgacagcaggcatcagctcggtcagttgcatccagccaaggaacagaatcgagaagaacagagcaccgctacgcgagaaagcgccgctggtatccagggactctccgtagaacaaggacgaaacgatgaggccgttagagacaacaatgaagtacttcgtgcacagagaagttttatcgccccagagcagccagaactgtcgctgcacgcaggccgtgacctggcgcacgaacgagacggtgtatggcgacttcttggagacagacttggacttggactgtgcgaccgtggattggaagcggcgggtgtcctcctgcccggtgtcttggagacgtttctcgtacccggagacatcctccaggatacggctgtaggtctggctgttcctgaaggtgttctcgagttcctcggcggtcttcggggtggacgcttcacggccaggctggaactcgcgggcattgggatcgcagagcgaagtaaggaagtcggccgtagtccattgcgcggggcagtgaaagcccaagtcgacgaagtattgtcgtgcttcattggctggtccttggtagagcatgcggccctcgtcaatgactagcaccttgtccatgagctcgtaaatgccctctccggcttggtatagcgtgacgaaggtagtgcgcttgctgacatcggtcatgatgcggagggacttggcgtagtccagtgcggtgctggcatccagaccgcgagtcgagttatcccagcagaccactgaggacttggtggctagggtctctgcgatactcacacgcttgcgctcacctccagagacaccgcgtacatactcgtttccaacaagtgtattcctggtgtgagtgataccgaacatcttcagcagggcatcgatgataatgggaatgctttcccggtcctgcttgcgggttttgttgataagggagaacttgagagtttgccagacagtgagcgaggggaagtgctggtcgtcttccgggttgtagttgacttctccacggaaatgcttgtgctgatcctcggacgagagaccaccataactaacctcgccatggaccccagcaaaagcaccacggtcgttcgcaatcgccttgaggaaggtagtgcaaccagcaccgggacggcctagcaccagcatcatctcaccttcacgcacagtaccgctgaaatcatggattagatcgcgaacaggagggtgcttgccgaaccgcagctgcggcacgaacttgcagacgagattgtacagatccgggccgaaggtgccaattacagcctgggggagagtgcgcacgaaggatgcgccagtctccacgccttgcacggtaaggttcttgaagacgacgccaaccttcttggcgggttcaccggcggtcgtgcggcgctccagatgaccaccaatcaggaagtcactcaggttgaagccgccgtcagcctcgtcctcggtctcctcttcgtccttgcccttttcttcatcgaggcggctggtctgcgattttgggtggcgaatgctcctggtgacagagcgggtgcggttcaggctgagacgggtgagctcgcggcgcatctcttccatgtcctccatcgcaccgctgcgggagacggcattcccggcattctgctctccccagccgccatcttcgtcacttattgacgagctgaatgttgagctgtcggttaaagttgggtcgatgggagcttcggtgtgaaggtgttccgtgggttgtgactctgcatcatggtgataggtctcaccggttgagctggattgttgtctggagggctgagtataggcttgggaatccgaggcgccatacgactgttcagaatggccctccatgtcgggaactgggtggcttctactctccggcaacattcaataacagatgtattatgctatagccaggctaattaaggacaggatatgcacagaaccaagggggaagtaaacgtaaagtaaaaggggcagagttggaagggaaatattcagaagagcaaagagactgcacaccgtttatataaatgtcatagccctagggcatttgtcagtcaggaatacgaatcattccaggacccttggaataactcaaacctcaggtcgaatcataagccagacaatgagtcctgactgaagagctatagtgggctatagtggagtggtggagtgtacatgactcaagttgactaaagttgacggtaaagaattttatttcaagcttccccggagataagccttagctccgtattgagccgatccgggctggtgattggctgtttccggctgctcatggacgttcattggctgttcgacgtgtcattgggcggaatatccattcctatcagtctaggcttatcacgtggagccggcttttatattccgtttcgtctcttttggtttcttatacaccgttataggaggatggattagcaatcgtgcttacgaatctgtttcgtagggataatccgtgtaacctccgtgtaaaaaccatgtaagaaccatgtaagaaccatgtaagaacccccagatatagaacaaagaattggatatcaaaccgggcttgtatattgccgatgtaattcggcgactttccaagatttcattgacccactcggctgaaagcatattccgactaatctgacttcatgtctgatctaaataatatatatggtcttggcttttatattgttgagagttccatcaggttctttttaacatatccttggtagcatcttacacaattgcctttttcaaaaagaaaccctaaatcccaaccttcacacttaacttgcgtccaggggtccccgataagctattatcaaccatgcacctccacgttgctatatcacatgtagacctgcaggctacacctacttttgggcatccatgttgtttatgtatatcgcactccatagaaacctatagaaatgcacgtgcatggtactactacgcgcaatccccactagaagatacggtctggctcgagcaaaagtccaacattggaatactatacaataacttctaacccctacttattttgatcgctacttacgcttagcagcagcttgagcgatccgcttctggatctcttcctttgagaggatcttcacggcgttgttggagaagacatagctgagtccagaccaaagagtggtgccggcaacaaggtacctaaaattggttagcaaaaagaaacaattcaaaagaaaccgcaagtaagaaaaaaaagaaaaaaaaaaaacatacaacagtgaggattcgctggtggtcacccacccaactactaactcaccggcgnnnnnnnnnnnnnnnnnnnnnnnnnnnnnnnnnnnnnnnnnnnnnnnnnnnnnnnnnnnnnnnnnnnnnnnnnnnnnnnnnnnnnnnnnnnnnnnnnnnnnnnnnnnnnnnnnnnnnnnnnnnnnnnnnnnnnnnnnnnnnnnnnnnnnnnnnnnnnnnnnnnnnnnnnnnnnnnnnnnnnnnnnnnnnnnnngcttaagtacggctgagcggacgggaagccctgttttccacaccctatggtcgtatgtaccagaaacagcctcgatgtgtcttaggatggaccatcgaagactgctcccatacacaaaaagaaaaaagacaaaaaagacaaaacaagggtataaaagaaaatatcaaacttactggaatccagtcatagcctcgctcaaatgccacgcactcacaaacgcctcggggaccacaggcagcgcaatcgcactacccaccaacaccagctgtagggcagtattgatcttcgaaatctcagtgggcttgacttccgccgagggaagtgagaaatcccagtaccgggccatggtcttgggctcaggcagcgaaatccaacggtaatagatagccgaaatagccagacccagatcgcgaccgaggatgatcacagcgagccagactgttcgatacgtcaatccatgtccatgtccagataccaaagatcaacacgagtgacttactaggaagagagccattcacggccagacacgcgacaccaatggtcatcaacagcttatcggccatgggatcaatgatcgttccaaccacagtttggaggttataccgccgggcgatgtacccatcgacgagatcggtgatgcccgcgtaggcgaacagggataacgctgctgtgtggtagttgtggactaggagatacccgaccacgggcgcggccagcagccgggagaatgtgagaatgttgggcacagtgtagatattctcgtgggaggttggcaggggaatccgtgatagaataggttttttcttggatccctcgggtctaagctaggttagtcgttggttcgaatggcttatgtcgatttgtatattgaatacatagtttggagtagacctactgttcaggagatttggctgattttgacccggaccatctttgctgggtgaagaatgatggtgcaatcagggttgtctgaagacaacgaggtttcaatctgatgaataattagaatgatataaatgaagaagtcacatacgaccatacctaggtgatcggttcaatgttgactggactgatgtagatatacatcggaatccatctctccgaagagattcagttttgaacacatttgactggacaagaagacgtgcatttttggacagcacttgggatccctgccggctcgcccgaagggacaactgggctgcgtatgagccaatcatggtgacaccaatataaggtgacagcggcaggtgttgttagaaaacaaaaattgacagcgacacgataatcacaagctttcaactagcaatttcagctgtgcatacccggtcgtgttcaggctatgcaatggtgattcggtgcaagtgatagaaagctgtcgccttgcacagttgctggtaaagttgcaaattcaaccccacaccaaattaaaccaagtatcaagctgatagcgcaaggaatgcaaataaacagacacaatgctatatagtacaaacacaatctagggattgttagctggatgtgtcggaattcggggcaacttggctgagcgggacatacatataacagaactccaaatgcagatcagttctaccagtaaatcaacgagctagaaccaagagctctagatcacggtcgcctgatgttagatgaactttggagattgcacctcggcgatgagtttctggccggataaatggtttctccgcccgtctctatatcgcaacttatccttcctgtgggcgtactttttctacattcatctatagaaagaaatatgacaatggatttggctgttaaatcatatcctaaactgatagtatcatctattggttcccgatgccaggagccgcgtcaggggatcatgatcaagcctctgctcacctgatatctgtacctgtgacctagaaccccaggtgatgaaagacacattgaacaaaatgacgacttatgtctaagcagtcagtaaaagaatatatatgttaatctcccacacagatgaattcaaattctcgcatctacgtctagaagaagccttagagccagatggacaagcaagcctgccagaacaaagctgcggtcttatctttgcgtcgccacgatgtcacttacttctgcccaaactgggtgtgtctcggactcacgctcattaactccaatctacagtgtaccatcagccaaagaaaaggaacaatcagatccaaatatggcgaatccacgtcttcttatcaaccgtgccctcatctacgagcgccgactacctggtgatgcttatatcaccgcgaatgtccagcgcctccagcatggatattactccagtgatgccgtatcagatggggacgctgaacacgtagattttctcgctattgcattcaccttccattcgccccacactatcgcgcatcgcatcaagtccgccactatcagtgtttcagttcgtggaagccgtgatctttcaagttcaaagttgtacccttttggatatccacccggtaacccacgcttccttatgcatgcgccacatctgctctacggcagtgtttctccagagaccatggagtggacattcagtctggctgggtccctcggaatttcagaacttcccgtcagcgcaagcgtcattccctcggggagcttcaatggtcggtacaagcggtacgagatgatgcgcatccaaggctccgcacgtacgttaaaaagcccatctggcagcgatttcgacgtcgaagctggcaggatcgtttggtccatggaagagaacaatgtccagcgatccggtctgccgcgcgagttcacctttgtcatgttgattcagaaacccacagcaaaaagcaagatttccctgtcgattgacgtcgacccggtcatcgacgcgatgattggcagctacccatcattgctgctgaaactgcctgaataccaacctttgccgcgccggggcgtcaatttccaacaagaagttggacagcggtttgaacctgtggacccggtgcgcgggttcaactttgcagacctcgggagcatgtttgatgagtacatcgccatgccaggaaggaagttcagccgtcaggtatgttcagcaaataaataaaatgaaaccctcaatgcatatgaagtgagccgaaactaataggtacttctctcagatccaaatcccatctgagaccagcatctctgagaatcaccagggcacctacccaggccagcaagggtctctaaacctaatcccgtaccaacaacaactgcagaaccacaacctggccctgcagagcaataacctcactttgcagaaccacctcttacggacaacccttagaaccctctggactacccagccgagggaagaaacccaatacttcccactcacttcccacgctcatccaacaccaacaccaacaccaacaacctccaccaccccccgagcagctgccatcacaatacctctcaacctgcatctccacatcgaccccgccacaacacacctcaccaacctggcgcggacaagcccaggtccctcccccctaggcccgcgccgcacaccaagcctacggcgcacgcaagcgcgggaattcccaaaggctcctctccacacctaacagagtcgatgatcccacacaggtgcagcagcggcgccgcactctttcatcttgcctcaagggacataggctgtgtgcctaatggatgtatttatatatgactaagcacgtgagcttctttcgtgaccaagaagcaaagaagtcacggtttacttatatatggatgagatcacactggaatatgggggtcgcctaaacctatcgacgctacgatctataactaggaagacttccgcctcagagagagaggtccggaagaagcgcatggaaacaaaaacaaatgactacgccacacctctctttaaagacgctgattttagcgagtggtcggatattcaagaaagtcgactgaggatcgtcccacaactattcagcgctatgaattgtctgcagtatcttccgttttgccattacaatatcatatcaccgagcagactgcagacgagaactccccactcttctggaaattctcgttctatgtggacgtcctatgcacggtacatcatgggattccaccctaggagcgggaataaattcagacaaatcatggaccaacccaacgatatcacggaaacctgggatgctaaaaaaaaccaacgccatatacaaggacagccggaccggccttgtaaatacggccgacgcacgatggagcgccatctgggacagaccaaacggacaacaacacgttaattagcactttagccagatagaagaggtgatacaatatagcatttccgaacatcggtatcacctacactcttctgttgtaacttgttccccattacactactttcgaggatttctcagcctcacttgttttggtgatgctatataagtcaccggattattgtattagcaggttaaatgtttactacctataaagcgagaagctgcaacctgagtgccccacgtcaaccttcctatccctcatatggctttcttggttggcactcctactgtggccctgtgaagatcaattccgacgagtcagatagatcgcttttagtaaatgcgttcgacttgcgagctcctaaagcacaaacgtaagacactgccacccatgcctgggccatattttagacctagcagcagctaggtcttgaagccgaggtgagctagaaggggtactccctggttagtcgctcgacgagcctaggcggagagcaagctgatttgcattctcatgtgtattcttgagacaaggcctctggtttctttggaaaatcatactgatatatcattagttgatgagaattttgaagctgattattggataagagatctatggcccacatgctttcgtgacatctcctattgaaacgtatcgtaagagaagaaggggccctaatccggggcctcttcttgtgattgggctcgccgttcgttgctaccagcacctggttggctgtccccgcaccttgatataaatttgaaggagcgcttttttgatcgacttacaaggacacttccctccaaatcttcttgaggatagttatatgtgaccacgagctactccagacgcgaacttaagtcagtttatctcggatactcattcttcttaataatgtctacttttcacggaagcgattcttccaaggaaccaaatgcctccgactactgcaatgatgctactgctctacctttacgccatcttcaaatgagcgaaactacctccgcctctgacacgtcctcaaactttgcacatatacacccttcgtctataccatctgagacaaaattttgccttccccagttctcagcttatccatgggctccttatctgacaatgccgaaacatccgctcgagatgactgtcgatactcacgcaaacccttctacattcagtggtcaggctgtaaatagcgcgttgtccgacacctggtctacaaataatccgttaacgagagatactcaagtcctgtccgcggagagcactgagccccttagaagcaggtatgtctccaattcatcctttcatagcaaatcgccaactgcctcgtcctaggaatacaaaaagaaacaaccaattcaagtgtggttgggagaattgtaccagctctggaggattcgcatctaagtcctctctcatgcgacatatcgaattgctgcatgtttctccacgtggattcgcatgccctcattgcagaaagtcctttaacaggaaggatcagctccaggcacacagaagcaccgtacatgttggctggggctaactggcgcgtctcaaacgcaggggtagtgtgtcataacttgagttgaagattgattgttcagtactgcaaaattcttatgctagagagggactagtagcaaaacaatgtaccgcacaagtaaaatcgaaattgagttatagtagccacaacaagaacaagcatctttgtctaccagggtcagttctctatgtaaacaatgcagccttctatttgatatcaaagttgtgtgagcgaaggctgtgtatgccaaatatctcaagcaagatatgagagaatgaaagaatatcttgccagattattaggattcctttttgttttacctatttgcacgatggattccatcggtttctacaagaaattacgatactataacaatgactcattgtgcagagcctataatccatactatagacggcgggaatcgagtattcagtacacgcacgtattgataaagccgcacctgccaagaaaggaaaggaagaaacgagtatggaagtaatctttgaccattgaaccagtggccattgaccatggaatgagatgggaatcactaaagcctgccccgtgtgggagtatagaacagagaacagagaatcataccgagcccgcccagaccagacgttggaaaagaaaccgttggacaccgtgatcgtagaagacaaacatacaggcgcggccttggcagcaatagagatataagggtcagagagcaagaggaggaagtagaagagtaggaatcagagtccaaaggtaaaagaagtagtaataaaaaaaatagaaccgttttggggttatcgggttgttgttgcatgacatcgtaaagaataagagaacgccacccacccggattcccagaacagaatcaatagagccaccgaaaggaaaaggagcaaagggggtaaatagaagcaaaacaggaaaagcagaaaagacaaagccacctccgtagaccgtaaagcaaagagaccataaccatatagacacgagtgagccgctgtctggtacatattgtagcaataaacggcgttttcctcccaaacataatagaagcgtagggtctatctccaggcaaacaaaaaaaaaaaaaaaaaacaaagaactcgaaaaaccaaaagaaaagaaaattccgcccggactcccacgctccatggccataagcaacaaagacacggaaaggtatcaagagattagatttgaggttgcgccatttgcggttgcgtcgccgccgtagtcgtccatgtcgacatgggttgcgtggcagcataaggcccagggacgtagtactgggagcgatccgtgttgtagtaggacggatggatgggatttgattcgcgacgaggaacgttaggatcgagaccaggcatatgccgatcgagggctgggtgtgggttttccagctggccggagatgctgaagctgctgcgggagtaggtggccggggtggatggatccatgggggaggtagcatctgttgcctggctgcgcgaggagatggaagagttgcggtaggcggaagggctgtgttccgaggcggatcggttacgttcgttgatcgagctggggagtcccgcattgatgccacctggaatggaggccatgctgtgtgcgctcatcgagtccatgctgccgccgtagggccggaaggagtggtaatcttcctgctttgggggaatggcggtctgtcctgggtttggcaggtacggatttggcgcggatgggctggccatcggcgcgcccatggagtatccctgaatcgggccttgctgcgggggatgtgtcgcggcatacgggctagggtgcatatagaagtcgtttgaaggggtgggcatagcgtaggcgggtggggccatcatctgcgggcgatatccgtatagcgcggcgtgggagggctcctggctctccacggcgttggcctctagctcgtcgatcggagaacggaagctttgtttctgggtgagttcggtgcggggtcggataaaccgtagggaatccaccatggaaggtgggttaaggataccgcgcatcacgtcctccacactgtagtatgagaccaaatggtgggtcacgcccgagactgttacgctcatcgtctttttgactaaccccgagtccttgaagccgtaggaatcaactagagaccccaccaatgcccgttcgagctccgattgatgggacgaacggtccgaaaaaggcgccgagttgggcgatgtcggagaatagccctggctgctgtcatgtcgcggatacggttcgcccggccggccggcgggcactggtcgccgagtggccttcttcatggcgcgcttcttctcccccggaggaaacggcttgtccaactcacggtagaccaggaagttccccagaatgcgactcgggctccaggtgactccatcggtccagcgcttgatgcccgaggcattctcctcatagatgaagacgctcccgctgcgcaccagatggctgcgttcccggtcgtgagggcggcgcgggacatgatgcaagacaccggtcaagcatgcctcgaaaaggattagggcgtcctgcgtggttgcgacatacccggtgaatgtgggctccaacacggcggcggtcccgttcaccatgatgtagtgtagtgaaagagatacaaagccaggtgcgaccccccgggcttttgcgaagtgatatattccccgaacgatccaacggggctcaaaagggcaaaaagaaaaaaaggaaaaagaattaagctaagagatcgaccagggtatggagaagaagaggaggttttgagttgggacccctcagttggagaaattcccagggatcgtgatcagcgagaagcacgggccctcgagtcgagtcagcgagtcaacaggttgcaccgattcgatcaggaaaagatggggatctactcgaaacccgttccacggtttgagttgcggcaattcccaagctttctttttttttgggggatccactgagagaagggagggaagggaataactatgtacctaaacggggaccctggctagttaagcgagagaggggaagtagagaatcagaaaagaaggggggaggtctgagtgataactccacagggaaacatggtacaatgataatcattgattagattatggattatttattggattattattattatattcataagttatataagtgatataagttcaacagaaatatctatgggatagacatcgggagtctaatggctaatgttaatgttaatgttaatctcggagggttgaactacttggtcgaaggatgagcctggagtatcaatgacagatatgacatgcgatattatgttttgagctttattttattttatttaatttatttttattcctttttatttcctgatttattttccattttctggattcggtctagtcgacccagaaaagagaaaaagaaaaaagaaagtggaaaccaaataaatcaaataaaataaaaaggagacggtggaattcggaaagcggagaaatacggagaatgaaacatcaaagtcatgatttcaccaaaccctccgcgaaagcaggtacagtttcacttagttcgagaactgaactagaactagaactatttatataggggcaatcttatcaaatattattgccatgaataatagtatatctacgctctcatataatgagctaacaagcagaatacaaaaagaatagaacaggtcaagatacaatcaccacccccgtgccatgggtgatccggtggagccatggattaggatcggagggtctccgtgacatcgtatacaacatacatacaacataccaaagacaagccagtagattgatgttgtatgtactccgtagtcaacggacttaactcgctgttgagtctgactcatcaaacacctgcctatttggaagagaaagaaagagatcatctgtgtctttcgccaggcagcgtaaagtacagacggcggccgtccccgtcctctgattggccgcccaaccacttcccccacttttctcatcgacgccccatcccagaaaggatcgcctttggtctcagacaacctcaggaacctcaagaggatcccaagggccaatcctccgaagagcgtcatatctcggggcgtaggtctgtgcacgccataccgagctattgaacttgggatgggtcgccgtccaacggcagtcaaggataagatcctcggtctggagcagccagtcagaagcgtcagaagcgggtcgtctgccctcacacccgtggacgggggattttaatataaaaaagaaattccctttctcgacatcttttctcttttttctttttctccgggtccgggtatcggtgacttctggttgggttatccgctgctccatgactggtttcccatttggaccaattccccaacgaagaggacgaggaagaggactgagcgcggccagttcaaggtagatctccgcctggacccgtcgattcggtatacaatctacgtcgtccgtaccataatgtatcccccgtggactatatatataatgttcgggtatcgacccgggtcactaaacccaatcagcatgaacggatgaacagacccggggacaccacgcgtcgcagataagaaacaaaaaaaaagaaaaccaaaaaaaagaaggttaggcttccgggcgagagagttttcggtaacttcacttttactttagtttttttttcctttgtcctctatctcagggcgtgaaagttaagaggggaagagggtcccgtaaccaatgcagaccaagaaatgacgactggggttggattggacggccaaaactttcgcgggagatcctcagcagatccaggccatgccacgctgccacgcacaaagtccagacacgggtctcagccacggggccacctgtctggctacgcaccccggtcaagccacggggctaaggattagatcggcgggcgattgagggaattattcagtacgagcaacatacatcggacataggacaggaagttgatccattgtatattgtacatagatagcggaggacagtgctccgtttaaagtcaggtcccagaggagtggtcggccacgcttgttgaaactcaattggcgcgaatgacagatgtcaggatataaacatttagtgtcgagatataagatagggctcgctaaaataagccagtacgtacgcaatgtgatgtatcactccgtataatcgccgaagtccgatagcataagaataggagaaaccaataattcagaaaccaaagcctggaccgaaatctgagatcatcgatattctgcacagcccatcacaagcccaggatggctctaagcgcgggaaggacacagcaaagaggctagcgttggcggttagacgtaacaaaggtacccaatatacgagaacaggaaactatttacatagtgtggtcggagcttggcatttccaatcgaattaccccacaaatgcgcgagcaaatcacattggaaccgagggagcaccagatgtggtcctatcttaaatagacgagaggcgttttttccacggacgatctcggtgcccattatctttctcgattcgaagatctcgactcataggtcctccgtactccgtactccgtactttcgagtcgatcgctggcctgcgatttgtcgacccacacaaatgcacacacccatacccagacactcggggccaaaagaaggattattagattacatgttttattataggtgggggatgtggaagctaagacgcttgaacgggtaggtgaatagcgattgtaataagcaagctgcatgtcaggtggagttttcgctactgaagaaaaaagaggcgcatctaatttaattccattggcactacatcaacctggacggagtactcagaaatcagctctagacccgttagggctagaatcggcgccgatacgaagatcgccccctcgaactaggcactggatgcccccggctaggagcaggagacacaagcacagcggcagccacacagggaaagaataggcaaatgcacgccccgtgaaggaaaacacaacccgaaataactcgcactaatcgcactagtctcagtggcgtccgtactatgctgtcttggggacgaactaagataatgccgcaactctctcaagggtctagcactaaggggcgatcatcattagggaacttggcgtcgacgaagatccggtttggtccaccgactggatggtttcgggggattgtagctttcacttcggaggctcggggaaactatatattaatctatgtatagttaagattgggtatctatagttatccattctagtcgtagatagatacaaggtacaatgaacctacggagtgcagaagatgtgcatgcctatgcaatgcaccagtatcacacccttccactatgcaccgtgccacaagcacaagtccctacatccaacctcgtacagagatcatgggaaagcacaagggcaatggcaatagacatagacatggactccgtctccgtactacctccctaatccgtccacaaacccgagactgttcgggacctgatcctcttacccgcccaggacaatagcctggcctttctacccctgattctgggtgttgcctattggctgttaagattccacagatattagagaattgttttatagaattgctcatttgctggttctttgcacggtgtggagcagtagtacatcagtagtacagtgctgtacccgacaatcataggacagcacccaaggtatgtggttgaaggtatgacatggcgcacagtggagagaaacaattcgtcgtcagcctcagggttgaatgcgcgatcatggagatcgtctatttattccatttcggggaggattagtggatgctctatccgatcgcgcttgtgtgcatggaacattgaacaaaggactagttctcaggtacgagtactcgtactccgtacatgtactccatccatatccatacggagttctgcgcacggagtctcccgcaggaggcaaaaggcaggcaaaaaacaggcaaagaggcgaatacgcaagacatggataacattatgatgtcgggtcatttgtatagcatagttcaagcatcgcctccacctcgtataatcaacacctcgaccccgtgatcctcgtgtcaaaccagccgatcgggtagaaagaaaacataaacgaggccaatgaagctaaggaagccagtgcatccacttatttccactattagttaatgttggcgtgtcacacacaagggatcgctcacgcccatgtggtcagaaggactgttggaacttggcacccagcgctacggctcgtatctgatttgtgcgagttggatcctgtttttgagcaatcaaggttgttgtattcaagattgtatatgggacattgaagcaggtatatcctacattgtagggattataaagcatgagtaactatgttgcaatctctagttagggctttacttatttagggctcgagtacttgattatgggaaagacatcaattcttggcatctgtatgaatattgcagctatgtataaacagaacgacctttctcggcttccgttttccgctttcttatttcccccttaataatagcgagacttccacaaccgatggtaggaagccgatgtaactagctacaatagttatgggatcaagatgtatcaaaatatcaattgatccactattgaaactaggatggctaaatccagccagataaaatagagctcgagacttccaaaagtagagtgcagagtctgatatgaataccaacagttcctacttcgccaaagtccgtcttaaatgatctaggggtaaagccaagcttataacattgcaactcaattatatgcattaggggaaagtcagttagattgctatacaaagtgttctccgtaccgcaaccttaagacatatggccatgcatcgacatagtggacacctcgccatccaaagcattgggatctatgacatcagtcaaaacccactaacgattttcaagatcttcaacgacgctattgactcattaataaatggcgggctcagggggagctactctaaacctctaggaatgcagtatctaactagcctcggcgattcaccttcttttgtaataattctcgctacggtataccttcctttgacgcacattagaagaatgcgaatgcgaacgtacggagtacatctgactcgggatccactaaatagttctgttcaccgatattgactcaaaaacagggccaaagcgaactacgccgttgtacgcataaagtactctatgatatacggcctcggtctgttgtatgtcgccctaagcactgcggcatacatcgtctctctagcgccgcgcactattatcacaataatactttccatcttgctatgtggagaccaacatggatatcatgcacatctatggagcgtcgccactatcccagcccagctggaacgtgttcccgtccagttcgcaagataagacccagcattctagaaggcaaatcctgacatcttctgccgacccgccatgtgcattcttcacctgcaccttccctgctcagctgccaagccgtcctagaagattgtgctagttggtgcatgaccgtcggcacataactccgtatgtacctagttgcttttgcctcatgcataccacagaatccatacaacatacatgtgcggagtacctacgacaggattttcctatagatctgtaagagcactaatagcagcgacatatgacacacgcaaagaagcgggctagcaagcaaggaaccatccatcccccttacgaacccgagaaacactcacccctcaatagccaaattgtacgtgctctgagaaaaaaaaagacgatgtactccgtactccaacagcgcttgcgaaagaaaaggatgcatcatttcgatagctcgaacgcctctcgccgatccactacagcttacccatcccaacgcgccccgcccttccgccgggtgttaactagcggcgatgagatttgtgatttcgcactcgatatacatcacagtaaccaaccaccaatagaaaaccctcaacaagcgattggcgtaaccgtttgttgggaaaaaaaaaggcaagagaggtgaggtgagatcagatcgcggccaacggcttatgcacgccaccacctctcccatcccatcacagcaccgatcaaagcacagcgtgcatggcgtggtagggacgtgcttgcaaaaaaatcgtgattcgtcatgtacgagacccaattcggtaggtggttgttcgtcacatctggacgaggaatgagattggatggttcggatacgcgctgcaaccaggatcacagatggtggcgcggtggctttttttttgcgcgggcctaagcacctaggtctgtttatttcgagggccaattcggcgatgcagtgcatggatcaggggaggagggatggttcttgttatgctgttgtggcctgattcggtcataggtacctctcctccccgggtttggtatatccctgtcgcgagaactggtgagtgtgtcgttccatatgttcccccttgcttgttttttttaggttgggggtctgattgggcttggtgcttgagggtacgtggctttttatccttgttttttggctttttctcgcgtgttcggttcaaggggaggtggagtacagggtatgttgacgtctgcgttgggttaggtgcgtttttgtagatctatcttggatgcttgtcttggatcggtttatgctttcgatttagctgtgaggttgtttgagacccttttcccaatctggacaggtactttggcactttagtgcggcttgattgatgaagaattgtgaatattccatatgctggataataaatatgcaaagatgcacatcgcagatcaaatagtatacatgttgatattgtacagtcaaagcacatgcgccgagtcccgctatgccaatataccaaagaaaagagagtcctgtcgagtcatgtcgtcatgtccattgcatggaatcaaggagacgaacggatcacatcctcaacagcaaggtcttctccctcgacctccttagggaacccactacccctccgcacatgcatcagcaaccgcaaagcaccaacaggcgtcacgccttcaatgcgcttggccatgccgacactgataggccgcacacgctccaggacctgtcgctcctcgttgctgataccgtgcacctgactgtaatccaaatcccctggcagcagcaagttctcgtcctgttggaaccgctcagccatcttctcctggcgtttcatgtacggcgcatagcggccttcgatagcgacgcgggtgaggatctccggcgcaaatgagaactgggtatatgtcttccccggagactcgataataggaatgagggtgttgatgtcgataccgtccagacacaagatatcgagcgctgagcggatcgaggtatcagagcgcaccttgaagcccttgcgggaccaggcagacgacgagagtttcgtgttgccaaggagagtctgtagctcttggatctgcgcttcggtatcggagaagtgacgccaacgcttgtcggagacgacgccggcatcgcgggccatgcgggtcagacgtaggtcggcgttgtcggagcgggtggaaatgcggtattcgcttcgcgtcgtgaacatgcggtagggctctgagacacccttggtaatgaggtcgtcgatcatgactccgatgaagccgtctgaccgggtcagggtgaggggtggtcggttctgcgactcgaggccggcatttgtgcctgcgatgatgccttgtccagtagcttcttcgtagccggtggtgccgttgatttgaccggcaaggtagagaccgctgatcaatttagtctctagggttggtcgcaggttgcgcgggtcgatgtagtcgtattcaacgccgtagccgggctggagcatggttacgttctcaagaccgcggactgttcgcaacatggcgtattgggcgtctgcgggcacagtcattgagatgccgttcgggtatatgacgtcgtttggtgcgaagccttctggctcgagccagatctggtgctgggtcttgtctttgaatcggatgatctttgactccagggagggacagtaccgtggcccgcgcacagtctcacggatgtggatggatttgtccagattggcgcggatgatttcatgggctgcttcgtttgtatgggtcatccaacaggtgagctgaccttcgtcgcccacttcaacagttttgttaagataggagaaagggtgaggcggcgagtcgcctttttgcacttcaagagcgctgaaatcgatggtcttcctatccaaacgaggtggtgtacccgtcttcaaacgtcccagttggaagccagcttctcggagggacttgctgagaccatatgtgggggcttcgcccatgcgtcccgaagggaacacatccattccaatatgaatctcaccccctaggaaagtgcccgtagtgataaccacacgtccagtaggaatgatctccccagattccaaccgcacgccaacaatcttgccctgagcaccgggggtgttctcgatgccttcccgggagagcacaatatcagccaccttgccctccacaatgctcagattttccgtgccagccagctcctccgacatataccgcttgtagagatcgcgatcgatctgcgcacgcggtccccaaacagccgggcctttcgaacggttcaacactcgaaacatgacaccagccttatcaataactcgacccgccacgccgtccattgcatccacctcacgaatcatcgttccctttccaatgccgccgaaactgggattgcacgaacaaacaccgatattctccagcgagggcgtgaccaacgcagtgcgcgcgccggaacgagcagcagcagcgcatgcctcagatccagcatggcctccgccaataacaacaacatcgtatggtctaaacgaaccaattagcaagactcttgatgacaacacggcgaaatcacgaaccgtgtgttatctgtaacagtcgcaagaccgcgactccgacccataaatgagcggagcccgcggttctgacgcatcagagccaccgaccgtgctcgaaaagccatgatgggatgcaatgcgaatgttaccctaaaactaggtacttcgtacaaactggacgatcaaatcgataaggaaaattgtatcttctcacgtgaccgaccttatacccgttaaccccgggcggtcacacatctgacataagcgcttgcgccatcggccaattgcggggctgttgatgttcagttgtaagctgacctgtggtaagctgacctggactttttctataactagcccctcttcgcattttcgaatcttacctcgcaatccgtgagaaaaacccccaaaatgaaggcatactggtatgacaacattgaggtaagcacacaccaattggccgtacccagctttccaagcatttccaggtacagcccacctcagaagaacaacgctgatgtcatctatctacagggcgaccagcgcgagccgcatgactccggtcgcgccgtgtcagaagagaagctcgcctcgctaggcgtgctatacaagcactgcccgacgatcgatgcggtggacaagatcgcagcggagcgcggataccgcaaccgcgacgaggtctgcgtgtcgcctgcgacaatgggcgccgtgtacgaggagaaggttaagtcgttcttctcggagcatctgcacgaggacgaggagattcggtatattctcgacggggagggatactttgatgtgcgtgggcaggaggacgagtggattcgcatttgtcttgtcaaggaggatatgattgttctccctgcgggaatttatcatcggtttactaccaatgagcagaacgtatgtttcttggctttttgtgttagggaatgggactgacttttcttttgcagtatgttaaggccatgcgtcttttccaagacgagcctaagtggacgccgttgaaccgtggtgcggatgttgatgccaacccgcaccggaagacttacttggagactgttgttagtcctactgcggctgtttagagtcgctttaaaattgagatgcgttatgacggattgcacatatactactgaccgattggaatcggaatttcttgagattgtcttatatctttcgttgcatggtgcttttaactgtacatggggacagcaaacccacagtaaatcaatcgaaaccatacctagtggtaggaacggtcaaccgacactcacttatatcaatggtctgggatgccaggcgtccccaatggcgtactcgccggcatggcaccaggcatatcaaaatggtcactcgtagcaccgccgctctgttgcctcgacatactcgagctgcgcaagccacccatatcaacattaaaactagtcgtgcgcgagccagcaccaagccctaacatgcccccacggaaccgcagcccctccagctcccgagcatgatcgtcggagaaccgcggtggtcctgccacatcggtagaactcacgctgcgcggtggtgccgttgatccagcatccgagtcctccccggtccggacgcctgttctgcccatgcgcggccataggtctggaagtccgacaacttgaactcgaggttcgacgacgcgctcctcgaaccatgcgtggactcgcgcttcgactagttgcgctatcttcggtacatcctgcagtcggctgcgggatccgatgagtgagcgcacggagaggtcgagacggtaatctgggaggaaggagaatgcgacgttgcttttcgggctgcttttcggtgggaggtggtcttccgagcttgtgtgctctccgggaccagggggtcgattccctgcgttgttccctgggtctgatgtggggtgcgctggtaatccatcaggtgtttggagtggttctgggggttcggtcgatgctgggatcaaggatatacaaagtgttcctgagaatctcacaactgaaactgacagcgctactggtataatggcagagcgaggtttgggataattcagaaccatggatgtctcgacagcaatagaaaggttgtcgtcgctaaggtcgacatccagtagcgcctgtagccgtccaccgtcggacatggggtcgtcaacggcgatgatgcggcagttgctgaaaatgggaaactcttcgcccaatgagatatcggtcacatttatctggtctatgaaagatggtttcttctccgggttgttcatggccgccgttagcgagctgaggattgacgaagtgggtgagtccttgagggaatatgctgtctccctatactgagcaattgtctgtgcaatgagcacattgaaccagtccagcgactcgggttgatgtgaggagtgatgcatgcggtgtcggccctgcttgctcgtagggttggtaggaatggcactgtagtatgttttgcggaggatggagcgggtgtttgtagaggtagaaggtacagggcgaagaacattcgacgtggacggtttttctcgtaatgacttttggctatcttgaggggggttatagaccgagctattgcggcggtgtgttgtgcggttcgacatgccccgcgatggagggggaggcgcttcaccaaaaatgaaaaacttgatgaaagcgcctatcagtagtactactgagagttggccgagaaggaacccctgggtaaaggacaagctaatgggtgttagcaagatcatatagtccattccatggacagagggcgtacgaggattgagtcgcgtatggcgcgggctcatctacataattgtcagcatacgattcaaaaacttcgagacaatgtcactcactttgttggagcaccattgtcagcggctgtcgacaattcttgtcacaataccatcccagatgaagatgttccaactttcggatctccgaggcttggccgagatcatatctaatcgatatgccaccctcgaccgcctgcctcgaaagatttaaggaagcgccctaacctatttcggggctagcgtcattagcatctataaaatacgaacacctgttcatcctgtttcagtcttagattgggtcactgattgcgatctgggaatttattagagagcatcatccgactgaaccggtcgatctaactatcagtgcccgttaagtgatcattcaatgctcagggtgtgcccgggtctactcagtagtcaaaaagcggcaagggtgagactaaagtggaaagggaaagccaaaaaaatggcaatgtaagataaattgcagagtttgtaaggctaagtccaaatacaacagcatcgtaataaaagcaacagcttcccccctgggcaacctgattaatcaccctaacgcttcagctgactggtcccatttactcttctgctggtagcttcttgtccttcaagtattcacacgacctcgcggttttactgtccttgttgtaccaatattagcagggcatatcccatctgtgctatgggggttgggggttataatgtctgggttgacctttcatttatactcactttggcttttgttcctgccagtttcggatcgtaccttccaatagttgccttgccttttaaagctcctcgtgatttcctactgagttcctcgtcatttataatcatgggtgatctatgattctattcacatatcgctaactctagctcaacctccgcattactatcccaaacggtactgtaatcaaatccgcttgggcactcccagctctgctaaagacttcgtcaagcccaccctgaccaaattgtcaatctccttagtcgtagctacagccatgatccccagcattcccaaggaattcaccccggcctccttattaatcgcacctcgtcttctcggcagcacgataatccacctcttggtaagaaccatattatgcggacagactgccccaggcgctgcatttgccgtatagtccccagccaccttcgtagcctctcgcaacaggtctttgtaagccccgaacaacgcagcaggagtcacatcgccctcaaaacgtcgataaaaccattcaaaaggaaccttagtctcaggttctccgggagaatccaggaaagcagcaaaactgttcgccggcaggggcatcacctgcatatgcttatgcaggcgactgcatccgccgttctggccgcagttgtaaaatgcaacataatcgctttctgcggagctgaggagctgccacgcgtcttctagatcgacctgctcgagcgcctcatattgtcgtttgtgtccatcaaacgtgagaagcatgagatggggccgagcaaagcagaacttgttcacgatcactaagtggctatctagcgcgccgagctcaaacccggtcgtgcttatgtcgctgcctggtcgcttttcgggttttgggatgccggcctctggttgggactgggggctggttagggtgggttttttggcgagagcagaagtcagaacgaattggaacttggtacgttagtggatgtttggtttggattatggttggatgtaatgtactttgaggtcgccgtcaatgtgctcgatgatttgttgtttgtcgtcgtataggacgaggccagattggacgaggttgtcgaatttggcgaggatgaggggttcttccattttgactgttctgtgaattgtgttagacgcaagtgtattctaatattttatggagattgggtagaaattcggtgggagcagcctatttatagtctctacagattgcgtgcacgtccgggatcttgatagtgggattaccattgtttttagggtcacgacaatgggtttttttgccagacagaaaattagtaactagttaataagtaactagttagttatgtagttacggggaatgcgaccccctgcccgagattttaggcatcagctatctctgctgtttcttgaatcttccgccagcaggtttaaattcctgtttacatagaaaaaaatgcaccattctgctcacaatttcatgcttctcacttcaattttattgcccagaatctataagctatgtattgaaggccttgaatacaagaagcccccctcaacttattatgacgtattaggtcacgtgccgcatcacgtacaaggtgggaagaataactacgttaagatagagagaaagaagaagaaagttgcaaacttagaaccctcccgcttagcaatctagcaaacatataaatagcaataagcaagcaaacataaatcgtaggaaaagcggccaggaaagcggtaaacatttatattagttaggcggtcagtcgctgcccgaactatccggcaggagtcccatcggccaaaagggggtcggaacaactatagggggggagggcgccctgatacaataccctaattaaatgcaatcggtaatccaccctagttatggcgtaattgtaagaagttgggctgcgaaatagtcattcgcctcacaatttcaggagatcatcgaatcatctttcttccaatgcctcatcaatccttccaggtagccccgcgtcgtcggtcacatcaatggcaatgaagtcatcccgagtgtaagaatacgcctgattttggagccagtgtcccagttgatcaaggataactagacgtatatcaagtgctttgatggcctcgtatgcccactggtggccaaatgatcctttggcgatatcggacgccggacgcgcacctaccatgacaatcttgcgtcgagctggcttagtcggaagtatccaatcaaaagacagtcgaaccttcaagtgttcctctagcatcttcgggatcaatatcggaagctacttcataaggaatgccccgggagaagaaggcaaaaaatataggagagacttgtccccttgagccggaatcggcgcaaagccactgtccggactcgacaaccgaacgaccgagttcacgtattcgagatcccgcaacctcaagtcgagaatatcgctcccgcagagatacccaccatgaggaactagaatcaccttcgttgccacttcgacctcgtcgccggatgcttggattgtgcggacgggatattcgatcggtgcctgcggtggacagaatccgaccaccttcagtggaatttgtggaagaaattctcaagaacagatcaagactatgaaagaagcccggtgtcttcactgtcagtttgaaccgccagcgacaggaaaactttgcaggggctaccgtgacgcaccttcgctgctactcgagtccataggtgctgtttgcctgggtgcttgcaggcagtctcaggcatttgggacctgggagaaactttgtaacctcccgcggtctccacaacgcttaactatatttagtggagtcctcgtggaggctcaattaatttcttttttttttctttgtgcagctgttgccatggtatacctgtcgtacgccataggcacagaatggcaacttcaaatatcgcagtggacacatggcaatatcccataggtgtattctactgcattgcatcccacccctgtcttgcccaaaacgcgcagtgcgtgaaatgaaaaaaatccttcagcacttcgtccgataatgattccaacttgatgcggtaaagcccacattgcaagcggataaatatagtagaatcctttcgtgggataatctatttggcttcgaggggccggcctgcaaatcatgtaccattatacttatgtataataattgtcttccaagccagataaagctgcacgtaattcctaacgatactattcaagcattcaccccattgcctgtgtggggaacaaggatataggttaaggtaacttgttttagtgctcgagtattactatgtcgtaaaatcagaccagcctcaagagtagtaattctaaatatatagagaatttccagggagtgagaagtggtccccccacatatacatattgtagatctgtgaactcctgctacgaaagggatgcgttcgttcctccgcccagcttaccttttaagttatgatcatgtaggcgctaacaatggaactttccagttgacaactagtttgttttctttcttctgttatatcttttggaaacaatataggctatttcaccactggaccataacaaaaaccaaggtacatacttatttagggcttagtgggaccagatatgtcctacttcttgtttgaccatgcattttataaagagtttaggattctgagaatgagaccgactttgacaagacccatcactagtaaaaagatcaccccaaaaatttactaaagtcgagtcgtagaacagtagaaagctgaaatcaaccaccttccatcatgccacggaaaatgagggggtttctacagcgccacgtcaaagaataagagtgaaatgaccatcgcatgattcaattcgcagcttatcagtgatgtgctaccctcgaccgcttctgaaactttaaggaagcgtccctatctatgtaatcaggtcctagcgtcagcgtatataaactatgtatgtacaccataagtaccccgtacaataatatagtacttgtggacctaaggtagatagcgggctgagtcggcagtgacataggctataccatggcatccattaagcctaggtgattcatcaccacgcaattgtaggggtatcaaactggccgccatacgcgctctcagctcaacctatcgtcaataattgtgcctcataatggtgttaatacgaggtttatccaccaatctcattatgacacgccccgtggacacccgtggacacccgtggacccctagcatattgctatttcgagttgtttgatagtgatcagctgcggggtaaaacatgcaagtcgagccatttggaatgttttctacccagtgttattagaaatcctagcctcgttcgatctcgggaggctataaagtcacagttatagcccacttttaattgcttctcacacaaaaagtctcaagtttttactctacataagccaatactcagtcacgctcttatcaatcctctttacctcattactaaaggttattcattagaatgtacttatcacccccggggaatgacattccttgtggattggacttatggtttatctaggtgtaccactaccataaccactaaaacggtgaccaaagtcgatgggagtacaacgaacacaacaaccacgaaaatagcagattgtggagttgctacttgcaggacgtcggcgtcttacctaggttgagctgtatgtctatatctatgaagatcacgttcagcaaaaatgtcccaactaattcaacgaaagcatagatcgggctgttcgacatcggacgaggtgtaacttgatcgagcacgcacttgaatgaagttggtgtacaagcttgcgcactgacgccgggggatgtgatatataaatcatatgactcagctatctttacgctacataggctacatagttaggtggttcattcattgacgataatctaaccaaggtcactttctcaatcacttgtagttctaatctattctccataaagaatcttcgaagcagtcgccaatggtagtcgatgaatggaagcaagtccagatgtgacaggagtgacttacttttgttagtggtctacatacaagtgtaggtacctggtctggtgtcttgcttctataaagcggtggcattagccctaagaaatcagaaaagggggtcaccaaattcgtattattgcaccccgcatcctcaccgcctctatatcgatgtagtcaataatcaatttggatcttcctccccttctgttatcatctcctgtgcgcatacattaaatcatcatgagtttcgtggaccaagctagtcctaagaatgagatcaagtttgagcaaaaaccattgataaaatcactccaagacttgaatatagtcgagtcgtggaaagatggaaagctgaaatccactaccttctaccatgtcaccgaaaacgaggaggttttctttggctacacctcaaagaacaagcgtgagacgagcatcccagaattcaattcagctctgcagcgcgtccaggatcaagatatttatccaacaattcccgccgacacccacttgacacttgcaccggaaggattaagcgcttcgtcagtttacgtgaaacgaccaggcctacagtggtacgaggaaatgattggcacagattatctccccaaggccgttctcgacgagacaatggtgatggagcaaatctcacaatcgcctcacgaaaacataattcgatattacggctgtcgggtgagacgtggttacatcacgtcgattgtgctggagcggcttgaccaaaccctgagccagtatgtcacgacgtccgattttcaagagctcgacaaagtcaagtttttcgaatcgctcaagtcggccgtggagcacctgcacaccttggggctggctcataacgatatcaacccggataacattatggtgaagaatgggtcgccggtgttaattgactttgattcctgtcagccttttgggaaacggttgcagtctttaggtacggagggatggtatgaagaggtgttttatacttctgagaagaaacatgacatatattcccttgagaaattacaggaatggcttcaggctgctaagtgatgttagaaaaagtcatgtctcgatacaatatatagctattaggatatttcttattctctattgtattgtttgtacagaactaattgagaacatagtacggattatatatggaaatgtttgcagagaaaaagacatggtcaaagattctaactatgggaactgaagtaaattacataaatacgaatagttggtcacatttgctacctctatattaagacaaatataatctagttggctaaatcgtagttttttatatatttttatagatatcttctctccttgttgagtcttttgtcatctacctacgacaaaaaaaaaaggttggtatagataatgcaaacagagcaaacaagctagattattccactccacttctacttaactgaaggacacgaaacccttaaaataatcgccacttgttgactcacaggctacagcattggggcctaatctctgatatcgtgcttacaactaatcactacctcggaatcaatctcaaccaatactcctccaggcatagatcctaaaccacaagctagagagctgtcagctctcaaccatccaaccatgcacattctccccaagctggcaatcacagccttactcctcatctcaccagcaacatgcctctcaagctccaaaccaccaggcaaagacgccatccttctatcaaacgtgcaaaccctcacactccgcgcccaccgcatgaccaccgcacggcgcgtctcaccaatcccccaactcagctgcgcaggcccctcaaaacaaacgtgtaacctctaccaaccagaaacaatgcgctgcacaaaccaaggctacgactacgacgtcgaagacgtgcagtggacatgcaccgcagacatgccggcagagttcaagctcggcgcaacagatgtcatctgcgagggataccgcaatgccgatgataagtgggtgttgaaggggagctgtggggttgagtaccggctgctcttgaccgaggctggcgagaagaggtttgggaagagaaacatggattcggagtggggcgggagccagtccgggactggggttcagacgatcatggagatgctggggaacctgattttctttgggttcatcgctgctgttttcattctgatattcttgcctatcttggcgcagtgtttcgggtgggggaatcggcgaggcgggcgggcggggcagccaccggggtggggcgggttctggggaggtggtggtggtggtgnnnnnnnnnnnnnnnnnnnnnnnnnnnnnnnnntctggggaggtggtggtggtggtggacctggcggaaatgaccctccgcctccgtacagcagtttcgatccttataaatcttctgctcgtcagggctggacgccgggtttctggactggtgcgctaggcggtggtgcggctggttatcagatgggcagacgggcttacagtggatcgcgcggcaggtctgatggatatgaccccggtgaaggcagctcgcgctcgccgcagttctcatctaccactgctagtactgggttcgggtcgacgaggcgtaggtgaacatatggacatgccatttacgtatgtcttgcttcgctcgtctttgctaccaacttggggagaagagataccaaaagacagacagaatttaacgaagtcacaaatcaattagcgaatcaaacagcctttaaccccgggcttgatcaatgtgtatcctataatcccactcagaacgccgtaaccaataatctttcacttcataaattgtgcattataatccccgacttaagccgtgggaaagtcatcgattgatcccagaacctcctctgtaccgcctccctggttcttcacacccgccttcttgcgcgacttcttcacggtcgtgttgtcgttcttgacatccttggaatcgctagtcgggttgcgcagcatttcctcttgcatttccttctccttagcgtgctggtcctcaatccgcttcttttcatcgtcaagttcctgctggacaagcttgggatcatcgtaaacagtgttggtcatctctgagtatgttgcgatgtcgatagtctcagaaggtcccatcaaggtgtctttgattcgttgcggatcacggcgttcttcattgttaaactttaacttgatctgacgacgagagcgacccgggaacattttgctgataaccatgaaatcggtaccgaacatgcggagaccgcgataaaacagttctgtcatatcttcatcccacgcttccgtctttgtacgtttgccgtacgaggcctgattaatcttccgggtgaatgagctttccaccacatcttcgaggtcaccggcggctctggcagcatccgcatgacgatcgacctgcaaggacgtattatccagcacgatctcaccgttaacgattcgcattatagggccactttggggtttccagtcgactggctgttcggttttctcttgttcaggctcagtctgcttgacgggcgttcctgttcccggcccaggggttccgccctgcttcttccgttcttcttcggccttatcaatcttgcgtagctctgtctcgcgtttggacttctttccagttctaagatctttgcaaagttcggacattttcacaacattcggcaaaatttctactgtttctgcgccatccggggttggttcgcgcttcttgcgggtgcgctttggtttctcactaccctcaggatcagaggtaccggtctttgagtactttcgtttccttggcttggttggatcgggagtcgaaaggttggattcaccggccgttgcacttgaatcttcgatggtaggcacgattgactgagagcctcgacgacttgcccctacggatacggactcctttcgagctgggaccgcagtgactgtagttgataaagttcgagcgcgttttgctggtcgaccctcgactggggcagcttgtccagtttctggttgagattgcggcagagcttcatttgaatcgacaagggtttctgcggcccgcgctgtttcaatcctagcgtactctaaaagagcgttctctggtccatgatcctcagatacaggttgagcctcactagtcgggacatttgcgggaggtggggtcggctgggtggaaggaggggtaggtggagcagtcaagacaggcgcgggttgcgagatagagatagaggctttgcgtttctgtgggagaggaatcgcagctggcttaggaatttgagtcggctttgagattgtagtcggcttagggatcggagtcggctttgcgatgggtgtagcagtaggtgtgacagtctgtgtaacgatgggagcggtgatagcagcagtagtagtaatcgaaggagtgactgcagcgttcaaagcaatgggcgtttgttccgtgataggcgcagctaccgacgcaggtgaggatgctgtgactgcccgcggctcctgttctgcatccacagagggcgtcagatcagaggaagctacatctttagctttatcttcctgaacgggctcagctggtgacggttgggcaacactaggtcgtctcgcgggcgcggcggcgggcgcacggcggataggcgccttcggagcgaatttcttgccggttttatctatcaaacgcacggtcagagattgcatacttattcttctggtccatatatactcactgattgcagaactggagaaggacttcatggctgcccattgctataaggtgtggattgatgaagatcataaaaagttccaggccggggaagtgggcgaggatcacgtgatggcactagcggacgctaaacctcgttgaaaatcctcctgtcttcaactcctcgatctctgccatcccaccccttctattgtctgcccgcccgctctcccttcacttccacttctttcgatttctttcgctatttattttatcttctaccggactctccttcgacaggattgacacagtctcgagatctgcgtctggctgactgacggacggtccggtggtgataatagccctcccatgctagtctagccactgatgccggccgtcgaaccccccgtcaagtcttcagagtccggtcttatcaaaatggaagaccggaagaggcccgctgcggaccataatgactcagccccgccgttaaagaaacaggctaccaccgttaacggtggtagtaagcctcatcctgatgccgacatgccatggaaagatgatttggaagtatgttttggttcttccgcgatctggagattggcttttggtctcctattgggtatatgctaattgggcattttgcgatagcgatttcaaaaagaagcgattttgcgccagatgcaagagtacaagcgggagaaatcctcactggaatcacgcttgagccagatgtcaaaggctgccacgtttcataatgatcatcttcgtgttatcgatttgtggttcaaacaggtagctttccccattgtttgtgccggtcacttggcatgaatttgggagcaggaactaacgctagtatagctgattgatgaagtgaaattgctacttgggccaccgcaagcagaagaccaaggtcagtccccttgttctagccccacaccccacccactattccaatattgacaatattcgcagaaaccccttttaaaagctccttgcagtttgaagacgttgaagagtttgagacgcatttgaaatcgcggtcggaggatattcacgcaataatttctcaagttcagtccaagtctaatgatgcgcctatcgaaatttcagaggtacagactcgccttgcaaagaagttggccgaggagaaagtgacgatcgccgaactcgaaaaaaccctggccgagaagcaacagttggaggaaagccttgaggaagcctccctgcgatatttggtagctgaaaagaaactggatcgtgcgaagagtctgactgttgcaaaattggaaaagcagcagtctatgggtattcaacgacctggggaaacgtcacaatcaaagcgcgaaggatcgaccccggccaatggaacccccgccggagaccgcaaccccgaattggaagaagccaataacaagctcactgcaatttcggagacacagaaggagcaagtccggaaactcgaagccgaaaatgccagtttactaggccaaatcaccgaaatcaaagtcaaggttggattcacctcgttacgttgtcattttgtcgctcacatcgggatcctagtcttcaaagttcaccgatgacgattacgcccatacggatttgtttaaacaccttcgatcacagtacgacgatgtagttaagcgaatcaaccatctggaagcgacaaatgttcaacttcgtgaggaagcagagaaataccgctcggaaagaatcgcatacaagatccaggttgaagatgaaacacaaagtacgattgccgagaaggaagctcagctgatgagggctgaaacggacctggctcggatacggaatgcccgcgacgaacttttagccgaccaacagatgcgaaaggccgcgcaagatcagaagaagacttctagtctgaaactgcaagaactagcagacgctagagaggctcgaattacagctttagagtcagagagtcaaaggttgcggctgcagattgagggctccaagtccgacgacaatatcaacgatatgccgctagaggagcttcgcgccaagtacaccagcctagaacgccagtactccatgctcaacaccgagttgacatcgatgcagacggcctacacgaagtttgctactctcgcatcgcagaaagttaccgactttgcggctatggaagagagggttgcaaggctgacggcggagaagtctaaagcagatcagaagttctttgctgcaatgaaaagcaaagaagcacgggatgtcgaagtgcgaacgcttagaatgcaaagctccaaaacgtcggatattgtggcccagctgaaggagtccgaagcagctactcggtcattagtgtccaacatggacaagcaagccaatgagaccaaggaggcactaaattcagccctgagcaagcaccgcgcccttcagcaacagttgaccgagagcaatattctcatggaaggcttgaaacatcaggtttctgagctcaaagggctttcaacatccaaggactcgacactggcaagcactacttctgctttgcggcaagctgagacagaggtcgctggtttgaaacagtccctttcagataccaagaagagtctggacaactggaagaccaagagtcttggcaattcgtcctcggaatatgaaatgctgcgggtatgttgaattttcacatttgttaatgaatcagagctaactacgttcagacacttgcactgtgtacggtgtgtcgtcgcaatttcaaaaatacggtgatcaagacatgtggccatgttttctgcaaagattgcgtcgcagagcgtctcacgtcgcgctcccgcaagtgcccgaactgcggcaaatctttcggaagcaacgaccacatgcacattaccctctgatcgaccttcgaatcccttgtattatattttcctttcgatgcttttcctctttacgtcttatctctttttagtatgtcacatccggacaggttcatggtgtggtgtttttttgtgtgtgtgtctgtggtttagcaggtctggtttgggtcggcgtttgacgagttatgcaccctcaaccctaactcggggcttgttttagttccttttcctctttttcccattacaaaccaaagcaatggtgggtttctcaaggcgcaggggcgtcgttcttcatcctctctggacgagaggccggcgcacactgattttctcagaggctgagctattctagatttctgtgtcatgtaggactaccgtgtacggagcagaaaaagtacaaacttgacgaatgcaatgtgagattttccataccccaatgacttgattgtcttctattataaagattcttgatattctcattctcatgagttaaagatccgactatacaacaactcatgcctcccaacccaaagatccagcgcagggacaacctgcccagcctgctcaacaggcgtattccattcccgcgcaatgcgcttcatcatcgtatcctgcaacccctgactagccaacacattctgcgcctggtaagggcccataacacccgctctgacagccgcactcaggaccgccttagcatgattcataacaaagacatacgccgtctgctgcaagtcgagacccatagcccgacacaccacaccccagagcggagcaaagtggcccttgggcccgagatcctcgtcctcctcgagacaagacttcaacgcatcggacaaatcatcgatagcagtggcggcgaccgcggtatctcccgaagccgggttctcaggcctcgcgaagctgactctaaatgcgcgctcccaaacaccgatgagggcgcggccttgggcgatacttgcacgctgcgcgacaatgcacggcgttgatgcgtccaggtcgttatctagtgtgtcgagggttgaaggttgccggtatccggctagcacgtaggggagggatgtgcttgcgattgaggcgatggagagtttgaggaagcggtggaaagaggttattggggcggtgcgagcaggtttgttatgagctagataggactctagtccgctagagtaggcgaaggagcctagtgggagggcggagtctgagaggaggaggagggcgtgaagagatgcgctggaggtggtaggtttattattggtattatattgttctaggaggggttagcttaggtatgcgacattggaggtttggatttgcctacctttaggggcccatgaggagggtgggctggggtattcggaggctgctagttgagcacgggcatcttgcaggcgcgactccaagagaatgacctcggcttcgaggtcttgggtgtcttggatcagcatagtgtagctatcaaatatgtggtagagtatcgtatatgtagtatgtacaaagtacagatttaaaaagtaatgttatctggatcggagggtgtcgaggtcttatagaagctgatcggcaaaacgaaaagcggaggccgccgcacttctccgtatcagcttgactgtttcacattattaactgtttttggacttggacattaattactatctcgctgatctcttttgccctgttttccccgcgtcatgaactaaagtcaatctccacaaccatgtcaggcaagcgtctgctcgacgccatccaattcctcaatgtgtcgaaaaccatcgcagccaaacacctggccatccgacaacatcagctagatgtctacacacgcacatcctccttgaccaagggtatcaaggcccaagcagagggtctgatcctaactgctcaagccgccgccgcattggcacgccgatttgacgagccatctccgccgagcccggcaaacgtccccgacaagcctcccgccagcactgcaacaccacctccggacctcgcccgcaaattgcaacgtcaagccgaatcgcaaatcccgtcttcggtggcaacatacagcatctatgagcaaccaagcgctctggttgcgagcaagcagcaggatgtcttctatgagccatcgcttcggtcggagccggatctctcgggcctaccgagagtgaaagtacccaaggccgcaagcgatgctcaagttggtagcgatggattgaacgcggatgtcttccactcgcctattgaatctagtaagcctgctccggttgagcatgagatgcccgaggagatggtccaaggtcttttccatagcccgaaagtgtcgcgcatgatctccggacagccgccgccgaagagggactggaagctggccgcgaagcctcagcagccggtcgtggatgctgctaagcctgtatccccggtgactccgaaatccgaggctcaggagatggaggagcttgcagctagcgtcgccgaagacgtggtgcctagtactaataccgtcggcgagaccaaggagccaaaagcgtaccagatgctggagtcgcgcgtgccgtcctctcgactaggcagactctggcagtacggtggtctagcgacctcaatggcatttggcgctgtcggagagggtttgcggcgagccactggcagtcaggacaatggatctattatgttcagtgctggtaacatggagcgaatggtagccaagctgtcaaaaatgcgtggcgcagctctcaagctgggacagatgctgagtattcaaggtacgttgcattgtctagctcactggtatcaataatgctcatgcaattgctagactccaacatgctccccgaaccaattcagcaagtcctccaacgcgtgcaagatcgcgcagactacatgcccgcctcgcagcgtgacaaggtacttaccgacaacctcggacccaactggcgcgaccttttcagcactttcaacgaaatccctatggcagctgcctcaatcggccaagtgcactcagccgttctcaaaagcaccggccaaccagttgccgtaaaagttcaatacccaggcgtcgccgactcaatcgacagtgacctgagcaacctctcaattcttctaacagcctcccgtctcctccctaagggactgtaccttgacaaaacaatcgcaaacgcgcgcaccgagctagcttgggaatgcgactacgtccgtgaagccaaagccgccgagcacttccgcgggctcttagccggcgactcagtcttcatcgttcccgagataatcgcccacgcctccggcaaacaagtcctaacaatggaaatgctggatggcgtagccgtgaccaaagtaactgacttcacccaagcccaacgcgactggatcggcacacaaataatgcgcctctgcctccgcgagatcaccgaattccactacatgcaaaccgacccgaactggacaaacttcctctacaactcgtcgacgaacaaacttgaactcctcgacttcggcgcctcgcgcgcctaccccgaggaattcataacaacctacgtgcgcacgctagtcgccgcctcccgcaacgatcgccgatcctgcaaagacctctctatcgagctggggtacctgacaggaatggaatcgcaggcgatggtcgacgcgcacgtgagctcgatcataacgatcgcggagccgttcatgctttcctcgccggatctgtacgatttcagtaaccagacgatcacggaccgcgtgcgcacacttattccggttatgattcgggagaggctggcgccgccgcctgaggaaacgtactctctgcatcgtaaactgagtggggctttcttgctttgtgctagacttggtagctccgtgccctgtaaggctttgtttagtgaagctgttgaggcggcgcagcggaatgggctaaaggtggagtagagagatgtggttatgtactattatagactctgtataactgtatactatatagtcagggaatgaatcctggattattttggttatgtcaagtatcaaaaggatccaggttgtctcgtaaagttaagtttgccctaataagtgccaagagcgcctcccgcacgcggctcaacaagacatgatggatttaatctatctccacaccatacaagatctaagctacgattaaagactcgggcaataatatccttcggtgaaaaagatttgatgaaactagcatactctattctttcggtaccaaaacaaaggaacgatatcatccttaactagaagcattgaagttatccaggaccgcgtcgtccttgatagtttcccaaataccgtcaattcgtctcacaactccctcttcaagaggacccttccgcagaatagccagggtgttcttcagttgagacacactactagcacccaccacaacagcatcgccgagcgcactttggatttgagagtggaaagcgacccagcggtaggccaactcagccttcgaaactcccgagtccttggacagttgatcccagagatcaagcgcctccaacaagctgggggtattgtacagcctattgtacaattgacctataggggtgctggaatcccagcgaccttgtccgccgttgagaagtgcctccttcgacttcgtgaggaaaccgcccgcaatagggctatatgcgtagaaccgaatattgtggcggcgcaggacggggaacagttcggtctcgatcaggcgcgagatggcattataattcccttggtagaccgaaggaaggacgtaacccttttccttgcagatgcggataacctcctcgacttcgtcagcgcggaagttcgacagcccaaagtagtggaacttgtgtgcttggtagagctcattgatagcggcaagggtctcttctagaggaactttgcgatcaggcgcgtggaggtaaaagatgttgacctaagaccattatcgtcagcatcggttccctacagtttgcggattgggatttcctgcacatacactgttcgtgttcagcttccggaggctctcgttggctctttcgatcaccagttctttggaagacgttccaggcacgaagccaccagcgtgcttggtatcgacgataaagcgggaagcggcacctgtttggcctaagagctcttcacttcctctatatatctgggcagtatcgatgtccttcacaccattctcctcaaggacacggaggacttcttccacctgcgccggggtggaaaagtcactagaagcgccgagaagggcgcccccatataccacctttacttgtttgtcggccattgaatagatatgaacgaaaaagggattgcaggacttcaaagtttaatgtgaaagtaatgttgagaaagtgtgataaagacaggctcagatatctatatataccaacacatgcgagataaatcacattagtaatacaatcacaagtgctctaaactcggagactttctatactgctcggtaagcagagttgtcattgaaccgaagccgaaggccgaagtgattcagatctctttgtagcacgtatacaagccctcgttccaccctgaatgcccgtccgcaaatcagaaccgaatattgaagggtgtggatccctttaacgcggccagacggacgggacacggaaagtcgtagggaaaacgggataagcggactttgacggagcgcagccacattttgtccgaacaccccaactcctacccaaaattacatacctccatatgtgagagcccgaaacttcggccgaatattctgtttttcaaggcgcatccactaaagcggccccgtgcatgagaccaactccgttctgatgaaggtactgactacgaaaggaggaagtgatcaaccgtgagtgagaatgatggtagatgacggaagatggggatctaggtactgtcatgaagctctcgatatagcttcgcgctataaatccgccagaagccagaagaaacatctctcagacatacaaaagaagtgccaacgcagcaagctgaacggcaagctgcctgtcggagaagtcaaagaaaagggaaggaatgccacagaaggtctaccaactgtatagggcaacagcgagcacgtcagaatgcatcacgttctgagctcacgggacagacggactctaacggacatgactcggactctctccgacaacgcaattcttgtcataaaccacatctaaaattactcaaactaggtgggtcggagatgaccggaaacgagggcattgtcatgagcatttcattataaataaagacaccatgctaccccaatcgtgcttcagattaatcctcatccttgcaagtcataagttatggttaccaacacccacaaagtatttagaagggatggagcgaccattcgttcccacatcgaaccacgtccgcttcatggcccatcagaagtccttgtcaaagtccgcgcggtctctcttaattggaaggatgtggcagtactcgacggtcgatttccctttccagcattggaaaatggcatctctggaactgagtttgccggggaggtcgtatccgttggcaacaaggtgaaatccttcacggtaagttcagtctagggtcggtttgtcaagtccgtggcttctctgactcgtttttattctttaggagggtgaccgagtaacatctttgattgacttggatgctattaccggaagagaaaaaaccgtgcaaggtttgtttgtatctaagcccggtatatatggtataaagtcctaacaagcacaggtctgggccagaatatcgatggaacattagcggagtacctcgttatgccggcggaaagccttgtgaaaattccagatcatctgacgtggcccgaggtaaacattataccagaaaggaagactgtgatttcttggagcagagctgacgaaagaaaataggcgagtatgatcgcgtgcgcaggattgactgcatggtcagctctcaatatgaagagctcgaacctgtgtgggaaaaccgtgcttattgagggtatgaatcagaaaaatcacgccaaccaaaggcacaatggctaaccttacttatgcaggaactggtggtgttagcctcatcgccctcattctcgccgttcgggctggtgcttatgtgattatcacgtcttcatctgacgacaagcttgagaaagcacgaatcctgggagcttcgcataccattaattatgccaagcatcgtgactgggagaatgaagtgctcgaacataccggagggctaggtgtagacatcgttgtcgagcagggaggagcggctactctattgaagagtgtctcgacggttaaaaagggtggccaggtgtcccaagttgggctgcttactgcaaatagtgaaggcgatttcgttttgctagtccagcaattgatcatcaaagcttgcaggatcgtgtgagtagtaatccctgtgttcattatatccaatactaaccgagtcagaggtatccaagttgggacgaaggttgacttggaagactttgtcgagcttttgagagtcactcgccttggactgttgccggttatcgatcgaattttcgaatttgaacaagccccggaggcttgtgcatacctgcaaagtggtaaagcttttggcaaagtagttgttcaattctaattgcataacgttctccactctaccagatatatgaaactacacaagaaccgtcgcgacgattgtaaggttccctgtagatagatattctcagataaataaataggtgttattgagactcttatgagaaaaacacaaaatgcctagatttctgtcacctaggttgggatagagtccatgattcgtcgtgccgctagaagttccaaatatatccctggagagacgttagctgaatatcaaaagcaaacgacgtaccgacaagtaagaacataccagcagatttccatttcgcgttgagtttttccaatgctgtttctatgacacccaagcccctcaattgacttgtaacaatgaatcttacccctgccaaataaaaccaatgcaatacaaatggcgggatatcaccgtgggttagatccacgctctccgtctccatatattcttcagctacggctagtgcgaaggaggcagcatcattagaaacagcgtttgcacgttcacgaagattcggttcctcatgagaaagatatggggcataaagcgttaggagggcgcttttgacaacggttagtcagaatgtataaaatgaattgtaaaaaggaaacagagggccgtcaaaaatgagtaagtgggcatgagagatacctaccaaaatgagattgcagtttggtagcatataatggaataagtcgtgcccgcattagactctgaatacgagattaacgcgtgaagggtcttctccagctggctaacctcttcctttcgaagttcaatgtcaatcgacatataaaggtcatggagaaggacgcggccaaggagatagccagcttgcacgacgtttgcgtagcgtccgagtgactcgggaggagccgacaatgtggagaacacatttttgtatcctccgtagtcccattccttctcctggcaaggaagctgttctgttaaagcgggctcggaaacaagcaactcctgtcgggggtttcctaggttcgcaattctgggcgagcacaaattaatcaaactgtacatatggggcccgtgccagattaaacaaaccgctcaagcatgaagatagcccaccaggttcttctcctctcttccgcttcaacccatggtgtatcactaataggaccatctaccgagctagtccaaccgatacctaatgcaagagaatatttcaggcagagacctattgatacctgcacggcaggatacatagcgtggccaatctcataaaccgcgaggagaatacaaccctgtagtgtctccatggaaagaataccggcaacttgcatctcagtaaacagccgccttatagtagagtacaatggggtccacgggttgtcgttttgaagagggctgaaaagatccatacatagacacaagaaaacagcatcagtccgcaggggcgacagcggattcagcaattgatcgtaaaccttccgttttgatatgattggcagccatggatgaacacactggtaatagcgagttgctattcgttgtaggccagtattatcacccataaatggtctcacgtaactcgggattaaattggggacagggagaattgataaccgtgctttacttcgttggaagacttcatggtctaagaaacgacaggccacactggtccgatctcgaggactctgcccgggctgcagcgcaggtggctcctcaacggtaattgcggtggaggaagtggtattctgatcacttattagatcaagtgtgttgtttttgtacgagcagaccctctggtgtctgggaacattagcccgaattttgattggcagtgttctgatgcttaccgtttgcaggcggaacactcgggcgtttccctattgcatttgatcttgcgtttatgacagaagtagcatgcccgctgggcacggatggggtcattggtagcctggtctgacatagtttcgagagtgtcaggcacaacttttaatgtttctcatcatagaacgggggaaggacggaaaggcgggggacacggagaagttgccacccctcacggagaatttccgagatattccgccgggcccgccacagcgagactactctagcaagttcgagcttacgatttgtcagggattcctcatcgatcatgatacacattcgaaaattgttctaatttggctcttgccttgggcttccgcccatatttcagaataggtgcgaattgatgtagttatcgtatttcaccagaccataaggaagaccaagtctctggtctatacgaccttcttaaagtgtagtaacggaagtaaaaagtcatgttttttgcgtaaactatggatccgctagctgccaaagccttgtaggcgacctcgccgagaggatcagactcttgacttaacgatgatgtcggagtatggctaggcgcctctctgccgaattggttgtatcggcgtcgacgggcgttctgagtatcgtctatgcgatctcaccggtaaggggagaattaccctagtcccggcgttgtgacgtgccgggtcttgtcacttgtaagacagaagattgcaaaacaatgcaaactagaaaacaagcaaataggcaaagcaaggcaaatgttggatcgtaataggcgcgatgggttgcgggggcagactgccatcgtcccatgatatgctgactctgccggcgtgcatagtctgcggcgcgcatagcgaacatctagtgatctttcggtctgatatctgctgataacctttttcttcaaggcagagttgcatgatatcttcatatatgaacgaataacggcctggcaaggcactcatctcgaaggcattcattttgagagttgtttgcggtatcgaattgcctttgtagacaatcaaaacgaagaagaacataaggagagaaagagaagagaagagcagagaagaggggctgtttacacagtccctaggtttggccagttttgtgcacgtcccatactccactggatcctcatacactgaagcatatgcaccttggaagggaccccagtctcgtcctataatatatgggctgcggtatcagctcgtccggggaatatcgattgcttcgtcgggctcgatgtcctcggggctgaagatcgttgaccgggttgatttcttttcttgctcgaccttttctttctaggagtgacccgaagagggagagggggttcgagactagagagcggtggtgttacagaaggtaagtggaagagaaggggatcatattgtgtatttacatacatggtcacagatattccagatcagtgaagggagtatcacctgaaggaacaaacagcatgatgagcgggccacgcaccgttcgaggatattgccagataaattgtgcgagtgcgtttgtaaggtggtttttgtttcctgctgtaggttgatttcgtgggacatgagacagtctcttggttaacggcccacatcacctggctccgccattgtttctgatgacaagaaagaaatcgaaggtaagaaaatctttttcgttgcgtatagatattcgttaaatcggctgacacgctcaccgtccgcgaggatgcgactgcggtagcgaaaggcacggcaccagatatcttgcaagatataatggttggtatcaacagccaccgcaggaatatatgaaacatgacgactagatagccatgataatggtatcggacaacccctttcgtttgactgcgagctatgctcgtcttgaggacgcaattggtgataggattgagctcccaaccccatatataggtgtggatgttgcgtatatatgactcatctgttgcatgattctgcgtataccaagattagttaatacttttgaatgagacgatcgatagtatataactcactggtgccatttgaacgaccaggatagagagaatatctctggttgtattatcattattcattgcgtgtcgaggagacgactgtggtaagggattctctagagagagatggaaggattcgctctgcgtgaagtatatttgtagtctcacaagagcggtcggccactcatgcttttccatatataacatgttatgagtgtgtggtcactcattaagaagtatgcccctgatatatatgaaggcaaggttgtagagcgagggtaaagcgaaggtaaagcgaagaaggtaggtgaaggcaatataaaggtggtgtaaagggaatgtgaggacaaagggcaacatgaaagaaatggattgtgaattcaagattcgtggttagcgctaggccgcgcggttgctgttcttttgggttatatatgttttacacaactgcagtctgtctctccaccttacttctcttccttcctccccacctcaccaccagcatcgaggcaaaatgaagctcgcctatccaccgtgggtgagaatatcgacgatatccactcagtcacctggcattacgcaaagtatcatgcgaggctcctcctgagcctcgcatttaagctcctgcccagcgtgtcattcaagctcctgttgttcgccgcgatgcgttcagtggtggttagaatttctgagattgcagcaccctggctatgccaacctcatgattgactgtgagcggatatctcagctgtccatagaccaggatatgtcggatctaatccctccacatgatcaaccgactgatcctgaggagccgatagtaggtgagccagaagatctcccgacccatacggacctggaaggcgagtacgtggctgtaacgaatcttgaaccccacttcgacgaggagacggtacttcgaaatatggtactaggcgccattcccccgcctgagcattctccagttccatcaacgccacgccggcacattatcctaccttctatccgggtcactcccatttctgccgacatgaaccctcggtttcgaatgaaagactgtgtgcaagttatatgtatatctggtccgatttcgaacaacaggcactagaagcttgtaacaattgactttcaccagtcacgtcagcgttacagattcacccgagggtgatttatactttgtcggtagtactggtcgcgaactgtggctagctggctctacgtgcaagtcgatgatacacttcaaaaaagcatccagaacatggcatacctcccagagtttgctgacaccatgttcgacgagatcatgttgatggtgcaaggaagcgacaaagctgagaacgcactcaacgagaccctgaagttcgacaaaatgcgtcgttcagatttcaacacagcgagggacttcatcacagagtaccaaaaacagtaccacgtcctcgcgcgcttcaagatacaacctcaccccttccatacgacaatagccaagccatcctatcgctcacgttcctgacccttttcccatatggtagggcggagattcaatcgtcgagaatccgtactgtcgaattcaaagagtgggcgcagcacctgatgcgccatgagtcgggccgtttcgctcggcaccctcgctttcgttttgtgatctttaatatgattgctccccatttcagtcaattcgacgaatatctatgcgcaacgaaaaatgtttttcttaccttcgatttctttcttgtcatagacaggggaacatgacacttctttcaataatctggagtatctcttaccatgtatgtagctacacaagaagggtgtggctgaacttgccatacataggcctacgcttgctgaactcgagcctggagagattccaacccaattttcaccctcttccaccaaagccccacagccagacatggccagaatcatcgcgtccgatcatcaaacccctcacctgagactggcctagaagaagcggatgtactgatgagtatatgtcagagcgccccccggtctctccaaaagcccctcgagaggaggcagaggccctggcctctgatgaatccacaaggttgtttgtgacggatgaaacgacgcaacatagtaccttagtaagttctatatcttcgaatcaacaaagtattcacaggtggtcgcttatacaaattacagtccaagggaatgtctcggggatgtgcctccctggtcatccgactagccataacttccatgctaccgaagagaacaaatagccaatttcaaccagtcccttgacgctcatacatgcagttactggaaggccgtgaatcggtacgattgtgacatggagaaggcccctcaagaagaactttcaaatgttggagattgtaatgacacaacagaagagatcgccaaagtaatcagcagagatctggtgctttgaaaaagttcactggctaatcatttatgcagaatagaacatagctcagtcaaagcatactacagactactggcggtggtgatggaggttcaatcaccactaaaaattcccattctgagatcaaaagacgtgaaaatacccagcaaaagaggcacaactataaaagatgatatcgagaagcaggaaaagtacatcggcggcgccagaaaccttaaggcacagttccatgacggggagttctccccagatgatgcctcgagatctctcagaactcatattaatgaagcctgcgagtagcccacctggaagaggtctcaaattgccaacagtagtcgtggattctgcgtggtctgggtcattgaccaattgacggaagattccctattctggctgaatgaatcagaccaggaggtcaaaatcgcattaacaacatcacgaatatcatattcggacgggtgttcttaaagacggggtccaaatttacgataatcaggaggccataaggccattctaggagagacttacggcagataagaaactccacgtcgaagagattccaggtcggtgttcactttgacgatgcacagagctaggtaatttggatattggcttacagctggctgatgcacctggtcgcacttaccattgcaagtaaacccagggaaagaagactgggagcaccaatgtgaaatcttcttccttttgatctccgtcaggatctacttataattttcgacaccatgtttcaaattctataatccttcgcactcggaaaagttcgatctcgattgtggcggaagaaggtgcaaggttgtgttcttggcttagtttagggatcgatcctcttccatttgctagctattacattcactagtggattggtcactcagattggccacccagattggccaaatctcaatatttgtctgctggatcagcatcgggttgaggagaaagggttatagaggaccctggacaatgtcgttactctcgatgactttggggacaacaacctagcagaagagaaggccaacagtgtccagcgaatgatcggcactctgggtgtatacatattgtttcgttacagaaatacaatctaattcaaggtcccattgacggtcatgagttgcaggagctcaatagagcttcatatagtagatatacgtgatgtgcaccgtatcgcgtaacacggtgatactctactctcgacggaaaaggcccgggaagtcgcccgttcgatgaatgaagagcaaatcgaactagacaaggtcaagacgtctcagcgcaggacccgaatgaattagatacggacgtatgatatcgttccagagattttattaaattcacaggctaggtatacgctggcatcacacagttgggttggacatgcagatatttgtcgattcaaccttggaagaatgatggtgataagaactatagtggcactaagtgcagtggaattgctggatttagtctgtatattacgtccgctcacttgtgaaaactaaacaatatttcatggtgaaactatctgcttatatcaacttcgtttaaacaatgccaacaacatcgagcgaagagagccaaggcagaacggtctctagcatatctgacatgtgatagcatccagatgtcgaggtcctccttctctttgagaagtggctccattttgtatagtacgaagcttcccaccgtaggcagtccctcgcagtggtctcctgatggagcttgcatacacagctattcttggatatagtcgaagagccgaatatcgaaacggcaaacggctcagatgggaagaagaaggatgggactcacaacctccattcccaccagcagcgacgggctcgtagcggaacctagccttgttagttactcgataccttcaaagtaagatattgggcaaagttgaattgcataaaacttaccacttggcccgaacgttgtcgttttaggatgcagagaagaagggacagcagagtgagacatgaagtgcggaatgagatgagagagaggtgaactcgaaagtcgagtcaatcaggttctgggctgtggaccagaccaactcagaagtcatcacaaaaggcccaagattccccacaatgtctccgagtgacgagcatgatgctcatcgacaaaacccctcaattcatgaatgttatcactccttcatagagactttaaatcgcgataagacaatagacagtggagggaaggttgatggggtggaagtgtgaattgcacgaggagcttctgttgactgtaataatgtttgtgtatctccctgcgatgttcggtgttctaactggagagattcgcaaactccctctgccactgcacaagggtctcagatcacggcttgctgttgtgcgctctcctcggacataacatggtatattgagagttcgcgctatctcccggaagacgccaaaccgaatatcaaatctgtgcgacgatgtgggagctatcgtgggagatttcagaaagaccggtctagttctcagtagttagtggccatattataattgatacctcaaaataggcatcagagcctgactggtcccacttactcttctgcaggtaggtttttatcatttaagcacgatctgggcccccctcctgcatggatacccatctgtcatggctgtgagatgggcgccatgaaacttagcattgagttgtaatcaacttcccatccattcagctcggtcgattgggggtggcggtgattgtagtattcatccatgcaattcgtcggcatgcgactgcattaccaactgaatgcatgaccggcgaaccaattctggtagctagagagatgtagatgacgcacgaggtcattccaatggaggtcggcagctaagaggactatgattgctggcctgcgttgttcttgacatacgccatgaggtcgtggcggaagactcaggacaatcgagtccagcggagatttagtgggtagttctgcgcactctccagaatcctcttcggcttttcctgattgtcacttgcccttgatgtcttcaaaatctgagggtcgcatcattcatcatgtcatttccataattccaagtccataatcccaaccagagctcatgtcgtgcctggttgagcctagctcatggatggttgtaagagaagacacacaaccatcaatgaccaggtatgtctctataatccagacgcacgtagtcccaaactcagaggaccagtcgtttttgtatgttatatccgaattcgacattgtgcaggtaatttccctttcttgccacaaatgacaagagtccaacatgaagtccgcctattggagtttctgcgtctggaggtcggaagcttgaggcgtagagcgctgtatcaatgcctttcggactgatgccgaggcggagcaggtctgtgggtccgcttgctagttatacatgggaatgtacttgaatttggcgcatcgatgatgtaggcgaatagtatatgcctttgaatgatgccgagaggggcagatgtgtggatctgtctttctttgcttgggatcttgtccgcccagcaaggtccagttcagtcggtggccatggtgcgaggcgttccgtgcggtctgcgttttctttttacggtatatttatgccatttccgagctaacgatcagcttttgcacgatgttggcttcggcaagtccgcggtagatctcgccagcttagctcagcctacctgttattgtcgcccctccagtccgtgcctcttgcactggacgacaagagtttcttggctcgcatttgtccggcctggtactggtacgtatgtagatctgagtagccacgctgtccagattggttgctaagtcggtctatggaaaaggaagacaaagcgaaaggataatcctgaggccgaaggtcggtatatagtcgaaaggccaaggagaaggacacggatgcgatcaacgtgcaagctgaggttgttgttgcgccaaacttcgttctgacctcatagggagaggtgggggcagaggcaggctgcctatatatcttgatctctcaacaatatataattatgaagtctgtgatgatgcctgttagtcaaatatcattgacttgactcttatttctgactcacctcaccacagcagtatcgcggactattcgtcgtcagccagcgtcgaggacaaccagagaccgtctgccaggttcatatataaatcactataaacaagccatggctaaaacgtgagagggcttgctacagggagcttgaaggaagactgcctgatgaatcagtgaaaggaaatcagtgaaaggaatcatataggtgtgagaagaggatggttgtagaagagaggagcaaatagctatctggctatttatatctgggccagtaagcaaacaatgttagactcattactcattgtggtattgtaatgcagacaacaaggaaatgttgaatagctataagagcctctctactagatgctacgtgataatctagaattacacaggcaaagagtatgaactcaagaaatcagagaactgtctctgtcctttcattactagaactaactagcagcgacttagccggccggattgtcatagtaacacaatccaagctagctttgtcgatcatcattccacgtcgcaacgtattcgtaactgtgattcaaaatcaacacgtaagaccgtaggtcaagatatttggaaaatcccaaagaatttcaggcagaggaaagaagagagtggacgtgaggcgtacggggtcttcaagcccagcacgtccatcggggtattgggggatgaaattttataggagatggggagggtagatcggggcgacacgcttatttgaagacgtgaccatcggcccactccttaacttggccgtcaacagtgacgggaacgtcctgggaccacatgtcctcaacgagcttgcggtcagcctcgttggaggggtcgagcttggtgaactcgtaaccctcgtagtcggggccgacagtgaaagcgggctcccactcctggccgcgggtcatgtaggcaccgtagacgacacagttgtagttctcgccgtaaacggactgagcaccgaagaggtacttgcgggaagcctcgagacgagtctggaagccaccgatcaagttgttggccatgaaggtgagcttgagctcgttgttgtaacggtagttgaccttccagagagagtactcatcggcgttgaagtgctcccagaaccagggcatggcaacggtgcgggggtcctcgttggagaacttgcgcttccagtcatcgaggataagagtgggcttgccaagagcctcaagggggtgcttagccttaggctcagcggtagaggcctcgacgggggcggcagcggcgggggcagcggccttgggcttgggctccttcttgggggcgacgtacttgacgacctcctcagcgaacttggggctggggacgacggccttgaaggcgtcctggttgataatagtgttgtaccaccgcgtggtggcggggttggcctcgcgccaggtcttgtccaagacagtggcgaaagcacgggtaaggagggaggcagcgaagatatcggccagagtgatacgctcaccaacaaggtaggtgttggcagtgaggtgagtctcgaaggcggagatggccttcagggcaaccttggaggcctcatcgacagtcttcttgttgtaaccatccagacccaacaaaggacggtaccaggcaccgaacttggggagaacctcggagttgacgaaggacaaccagcggaggatggaagcgtaatcctgcttggtcttgccgagaagggtggtcttctcgttctgggaggtaactatgaacaggacgtgttagtcaagttgtttgaaactcgatggatccaacaatggagcaatcggaggtgacaatggcaccatatgtccatttcaaaaagagagtggggtggtcgagtccaaattttcccgcagagcggggtagccaatatttttttcagagttgttttttctcaacagttgttataacaatagttataattcagacagggataactaatggtgtctcatcataaagaagagaggcataaaaatggaccgaggggtgtgtggtgacgcataaaagggaggatattttcacataccatagacggcaatggcaatagcctcagacagagtgaagccattggcaccctcgaaggcggggatcttgccagtggggttgatcttgaggtactcagcgctggtgttgaattcagcggtagagttggcctgggtgttaaccagctccaagtcgaggtcgttgtgcttagcagcgaccaggatggagatggtgcgaccgttgtcctagaaaatattagacattgcatcaaaataacaaagacgaagataaacatacaggcagaccgtagagctttccgaatgccatattgaatgtaatttgtggaatatgaagggaaaagaaagaaggaagagaaaggagaggggcgagtaagaattttgtgctggcgggacgacttcggtgctcggaggaactgatattgccggggtcacgtcacatgacccgacaaaaaacatgacaactcggagactatcaacggcctccatccaggacctcaaatccgcgttgcagccccgaattccccgccaattccaccagccatggcgtggcacaaacccaccagcctcgcacaggcgatgcaatcactccgcctaacctcaaccctcacaaaaccctcaatccaagcctcccgaacaaccctcaacaccctccgcacacgcacctacgcaacagaaaccgaatccgctccggcggccgcagccccagaaatcaacttccgctccttcacccaacagcccgcccgcatcatcccctcctccccatcctacttctccggcagcccgcggttcatcgaccacgtcctgcagctggaagctctgcaagcgaagtacgccgcactccctacagtgcccaccagcgaggcaccccgcatggcgtggttcaagctggcgcagttccgcgactacgtgggcgagcccgtgcccatgaagaaatacaagtctctcgtcaagatcctgcagcggctgaaccgcatcgagcccgaggtgctgcctaccgaggtgcgcgataccctggctgcgttcttgcgtcccggtaacccgtatgcggtagagactgtcccgcgcacggtggatgagaacgggcgcgctcgcggtaagggaaagaggaaggagtctacggctgttgtgcagcttgttgagggtgagggtgaggtgctggttaacgggaagagcttggtggaggcgttcaagcgggttcatgatcgtgagagtgcactttgggcgctgaggtgtacgcagcgcttagataagtacaatgcttggattcgggtgaagggtggtggtgttactggtcaggctgaggcgattacgttggctcttggtagagctttgctgttgcacgagcctgggttgaaggcggttctgaggaagggtatgtttttccttccatttttgctcatttctttgttgacgcagttgctaacttcaattcctttacagccggtgcaatcacagtcgacgcccgtcgcgtcgagaggaagaagcccggtcacgtcaaggcccgcaagatgcctacctgggtcaagcgttaaagtggccagcgaatcctatttcctttttgtttcaatactgtattattcaccacggcaccccgagttcgcgacttgttttatatcctgtactctcaatgcatatggggcaacaattctaaggtttcattgaatttgaattgatcagcgtgttgtatattcacttacacctagagtccacggtcctactatctttaaataggtgttaataagtatgtatggactgtgtggtaaagtccatcttatacaccttatctttcttgccgcttcttcgcacgctggcaaaggccacgaaagagatattaaaatagatgccggtaaggccagacgccatcttcagttatggacattataaccgaccattccgcactaactaactagagcatgcatcgagcctaacaagcactaccgattttacctaatgtggcttaaacatcgaaaccctgcactgggaaatcgttcgtaattgatatcaagtactccgtaggtcgactctgtctgagatctaatccttacaagggtatactaactagcgaacgaatacaaataaaaagctcaaagccaagacgagcctttgacaccacataccgaagcaataagcagcatgaactactagaaaatgaaattaaatgaccccaagccccaaatccaagcccaagcccaattccaaaacgggaacacaaaggtcccgttctattttttgcgccagatgcccttgttcctttttgtgacgccccaatgcaaagcctgtccgatacatagaacagagataggataggaaattataaccgaagccaatgaaccatccacagaaagaagatcatgagactatgtacaactcgtcaaattcgtcattatggtatataagcggggaagtggaagactgtgatgattgtgatagtggccgtggttggagaatgatgaggtgatagtggccgtggtgatggcgaatgatgaaaaagtgacagtgatatttcgcgccacctcgtcagcccgagttgaatagacgataggtataatttgaaaagatcaagcgctgacagccaagccggcgaatgatcgcccctcccggaagaccgatgaccaaagacggaaggagggggccggtcgatctctcatcaaaacgaatgcgagagtgatttggtgcccaacacgaggggagaggtgatagattacctcttcgttgtcaagtatcaacatcggggttggcgcgacgctagtaggcaatagcctccccgtggcggcagcgcttgggtgatgggtcaatgcgtccgatcgtcacggtgcagccgtgtctttcccttctgggagacccgatttgatgtgacgtgagttatttggtttttggcgattttctttttttcgcttttctgctcgcctttttccgagggacttggttcatggtcgaggcactgtcgtggcttcgggtctgacagggatgtggtggaggtcgggtctactgtccatgagatcaaggcattggcccaagactagttttgggatgattaggatgtaatagaggtgcatcggagtatagcgcaaactcaccggacaggatctcttcttcccatatgcccatttgataatctactaatccgtgaggctcaagttgatcgcagagctgaattaggtcccttcccatagcctccagtcggtctcgtcgaattagactcgtatgcgcaggttgttgaccagtcgcaatcacctccagcatcagatccttttgcttttgacatatggctagccaacagagattgaattcgctccagagcttcaaacgctcggagtaatgggtgttgtcgtcatggaggaggcctacgtatcaaacaaaaaggattagcctctcactgtagatcatcaaggtatcgaatgatgcttgcatgacacgcctgtaagcttagagccaaacattagggggcaaagagaacaagaaaaagaagggtccagttgagagtgcggcttctgtgctactaggcgagggcacgcatagtaaccctgtgaacttgttcctctgtcttctccgaaggggcgaaaaaaaaaaacgataacgctagcgagaagactgcatcttaccaagttcccgtgcattggtcaccagccactcggatatttcaagcagcgaccctccagcctctaccaatcttccggctcgcgtttgatcgaaagtgtggcacaggatgcgttgatatcgtccgatggcctcatccaggctaggctgatccgacggttgggactcttgttggggctgatccactctgttcatggacccggaaccgattgcagcgaaatcagagacgggtgcagaaaaggtctgggtggtgttcgggcgtgccatggggtccgcttggttataaggctggagttgcgcatttagataaggagagagtcccgcgaccccagaccctgcagattcttctggtgcaaaatactgtggaacggcaaattggttcgacaggacatcaatggctgcagactgccgtgtctggtactgtggcacaacctcgaagtgtccctgggttggaccttgctgaccgaacccgtacagcatgttagagtcgtagggtgggaatgcagcggggtcctgcggcggcgccccccccccgccgcgccccgtggctcnnnnnnnnnnnnnnnnnnnnnnnnnnnnnnnnnnnnnnnnnnnnnnnnnnnnnnnnnnnnnnnnnnnnnnnnnnnnncatgttagagtggtagggtgggaatgcggcggggtcctgcggcggcgcgcgccgtcgctggtgttgaatagccggcgcttgttgagatcgttgagctcgtacatagtcctggggctgatagttctgcaagtcggttgactgcagggaaccgccgtggaaggagctgcctgtgtatccgtagtcgtaggacatcgggacttgctccgggggttgcgacatccccgtttggtttccacgtggtatggctgggtcaaacccatctgctgcacgaccaggtggtctgcgagcatttccagaccgagacattgatctttcattctgcttcatacgtcgatcgccatccatgaggctgtcccaggatcggtgcagatcaagctcagcccaatgcttgggggacagcggtgggcttgcgtagtatgccagcttggatgatttctgagggggattccagggaactttttccactgaaggcttttcccctagttgggggtgggggagagagagataggagggaaaagaaggatgagacgtaatccttgcggttcaagtagatattcaaatcttgtcctctgacgcagccgcgacacagatttaagtaacagagaaaacaaaatcacacaataattgaaatggaaaataaagtcggccaaaaaagtagaaggagaacaagggggaaaaagcagaattaaaatgcaattaggcaggaaattagggcagagtcaggtagacggagatattaagaaagaagagtgatggatctgaaaagaacaagatggtgagctgatcaaggacttgagtagtaagatagatagatcgagtatatgtatagtccagtccttgaatgggtctaatatagtataagaagggtataagggtaggtataagagtggatagtataagtaaaaaaagggaaaccaagggggaaacagaagaaactagggcttttcccgggaatagaggcaaaatataccccaaatagcaagtagcaaatatcccaatctcaaaatctaaaacattaagccctaaagccatataatatgatcgacgatcgaggatctacatctaaactccatttggctcgggaacccggcgcaatggttcttggcctcgagggatttggggatttgcggttttcgacatttattgcatttcttagcttgttttctttttgatttttgatttttatttgtctacaagttcagctctcgatgtcaggtgggatactttcctttcttttttcctctctgttcttcaatttatagtgtgtaacaccgtctatgttgcctggggctgatcatgaaggagagtaaacatgagacaaaatatcctccccttgcgtagaatgtagaaagggtaagagatgagaaaaagcaaaagtcccaaaagtataactaaacgcagctaaacgcaactaaacaaaatagttggaaaaaaggggatgctatttacattccggggagattagccgggcagctgctggaacctcgcggagatgcatgatatttgaggctgacatgatagcataataattaataatagtagagcagagaagatccgtcatctgattgttcatatcttatacatacataaaactaccccgtgcttaatagaccaatatcaatcaattcaaatacttgtggagcattgttcgcccgattggatctgcaaagccctgacggccacctacatacgtcagtttccttttcctcgggtttctgattgctcaggtctcacgggaaaagcaattattaggactatgaagtactggacaaaggtatttgtttatgtttactccgtactccgtactatttaccctaaagggtccctgtcatcttccaccctagactgaatccgacactttggttgcgatggctattactgcggatgcgacatcgaagatccgctggtttttgtgaagtaattgtttatacttctcccccggagatgatctgcctacactaaccttagctattaatatttaacctataaagtacatttctatgtacttggagtactccgaactttatatactacacagtatatacttaatactgccgtatcgacagatcggatcctctaactgaacgaaacaggataggatcatgcaatatgcggaagtatacatgaataaaataattaattaattaattctcttcaagaaaaaaagaaaggagaaactattgaaaattaaattcaaccgttggacagatagatactcgcgtatattcggacttcaaatcacagttcctcttgatatatctcccgcaaccaggtgcccgacacgttgtataaaccatttggtagcacaaaacacgaggccggaactgggtattatgggcttggatatttgcaatgggacctaaaaaagggagcaataatacattgttattgttgaaacaatggccttttggctactccatgtatactgttatcgaactatatctccatacctggagccatgaccctgtttcaggtctagatatcgtcaaacatgtcagacgaaacatgcactaatatctaatcttagaatcccaaaaagaaaagcatggaccgaactcttcttcacactcttaatcccatgaccaacagactcagacagaactctggaagggtcccacctgaaacacgacaaacagactattactacctacatcggatgttttatgtagacagtaagtagaccgaaagtaactggacacccccttcttcctttccttcccttcctctcctctcctcgtaaataaggaaattctattaaaaattaggaccattccctcgaaacaacagtgcctcgccttgtgcgacttccatctcggactgcagacccaacgaatccagtgcctcggaattccgaaattaccgtctcaccacgcttatccagtccggttgcccagtcaggagcacgcacgtcgccgagacgggagggtgagcgtgtagataagtgtggaattacaattagcatcaaaggttatactacatagaaaggtcgatttcgcaaattaagcattttcccgacttttcgtctacctaaaaacctaaggagaagatatctaaaaaaacatatgagactaccatcgagtcaactagacatgtcattctcatcttagtgacgaaggctggtattatggatatgtgcagagaacaaatgtatacacagcgaaagcatatacaatctgcgtaatgaccctacttacctagacggcaatgtacccacgcctacccaacgatatctctcttttaaccttttaccttccattcctccctatccataccggcgtggacacatgcacagactatatatgtatgcagacagggatgggacgggagccagggtccgggagaacggcaagaacaacatagaacagcagaatgggagcgggggtagtttgtgctgccaaggttaaagcaataataagatgcaatatgcaccacctctacccgcaatgtgctgtgcaaaccgacaaggatctgtgactgtggctgctcccgtacccgactcgttggttgggagtcatccggtccacgagactgcggtccagagggaaagggatgttcgagggaggggaactggtgtttgccgaggttagttcgttgcgcggaaactcatggttggtccggatgggaacgggggttgttgctcatgcggctgaaacgtcaaagctttgttttgggtctttgttgttagagttgaggttgagtgaagcgtgtgctggccagacaagccgatgctgatgtgaggtagggaccggggtgtgtgggtgatttgtcggaggtaaagttgttgggttgtggaaggggtcatactgtacttctaacatacttgagtctgtcatgcatataccttccagggtgacattatgccctgccatgacactgggtacctgagctgataggaaaattgacacccggaacaaagaaagccgggagaagaagtcatggggaagataatttccatatgtccttcccatattgggagaaataaactacacgcatcgctgatcattgagtcatgtcatgtcgagaccaagaaagagaaaaccgagcaccaagaagaaacaccatatcgccactcaaccagcgagtaaggcaatcatatttgatctggaccatagttagcacgaagacctccaataagaaaacccggatcaaaacatactcagtgtcatactgatgctcacgtctgtgttctccaccatatccgtgaactcctcgaagctaatctttccatcctgatccttatcggcctccataatcgtcttgtcgacgatctgctgcagctgcacgtccttgaggttattgccgaccatcatcttcagcacaatgaagagctcgccgttggaaatgtaaccgtcacggtcaatgtcgtacaccttgaatgcgaatcgcagtttctcttgcttgttaccctttgagctgaatgccgacaggcccgtcacgaattcctggaagtcgacgtcaccgccaccgtcttcgtcgaagatggcgatcatcctagcataaaacagttgggtcagggactagtccgtgtatatatgtagatcgcagatcgtaggtgggagtttggagtttggatgtggatgcccagggagcaacgaacctcgtggcgagtgggttggacgacacttggggaagggagaggaattcatcacggtcgatagtgccgttggcattctgtagattgttgagtatgttagagcatattctcataatccgcgcgacgcaactgaccttatccagcttcatgaagcgcttgcgcaggcgatccacctcatcccggttgactgtggtcgcgaagtcagccacaagcccgattcatcgccttcataccctatccgaccggggaaaacatacagttggatgtagacacaatgttatcgaagagctgggtggtacccacggagccgcggcgtctccgcgcatcgtaaatcgcagcagcgttgggctcgttggtggagggctccatgttgggtagttggggagggaaaggagatgtaagagagcgaggtacggtggcgagttatgcgataaatgtagcaaataaagttgtaggactagtggaacagcaagtaaagaagggccagattaagcaagacagcaaaagaggaggcgaagggttgtttattgccaacggcccggggaatctgatatcgcccagccccgcactaaccggaagcggacaggcaagcgagcccctgaggccgtgcactcggccaaaacaggccactgccggctgacattacaacgtcaacccaaccgctagccgtgaatcacctcatcttcagtcgtcaatatctccccccctccatcaaattccatctcaaaaatacgtctacgagaaagcgcatacacagagctttgtactgattcccattttaccccgtccccgcccatggtcgttgccctattgcgcgttccgacgctatgactcggtacgggggcctgggcaggacacgccctaaaaagctcacctctaaggcatctattcccgttgtccgggagtcagagatcgatatcatcgacgatgaaatccagagctctctacagcagatcgaaaccggcgtcgaaaaggccgaggagtcggtgagtccctaattttagcctcatccccatccccatcacgtgacatcatcacgagattttcaccccaatataaaatgagtcgcgctgaccttggatcgggttaggaaattcacctgcaacgtgcaattaatgccactgcccagggcaaagtaaacgaggcacacatccctactcccgagaccattctcagtaatcttcaatatgacgaactctatcctcccatcttctcgcagcctgcgacgtacattcgcttctcctcgactgtcgaggattgctgcggatgcccgtacaacatgacagaggacgatgatgcctaccttaagctcatgaaccagaagcgtgatccatctgctggtcgttgcacagaggatatctttgaggaggtcatgaatttcttcgaggagacggcgcagataaagcagccttacgcagccattgataatcccccggtgttatcctttgcagagatgcaggacatgatggatgccaccttagaagatcccatgaagatatttgccaaggagatatatgagcactggaagtcgtgtcggatgtctgttcagaataacgcaattgtaccgcagctcaaggtacgttcttttcccatgccaatgacaagcaacgtcactaacttctccgcagttcgaaactggtcaagacaccgacgacagtgatccatttgtctgtttccgtagacgcgaggttcgccagatccgcaaaactcgtggtagagatgcgcagagtgccgaaaagctcagacgtcttcgcaaagagctggaagatgctcgcgagctcgttgctttggtgcgccagcgtgaaattgctcggagggaaatgctctccatggagcggcacctcttcaagcagcgtgctgaggtcaaggagatgaagcgcaagctcaacgtcaaggacgatgatgaggacctcatcaaccaaaaggtaggcggcgttgatactgtggttgctcaatatatgcatatgctaagcaatcacccacagccgaaaaagagagcgctcgatatgccagctcaacgtcccaatgcccctcaattgcgcatgcctctcaaggctgggcaaggtgcagaggatttgcaactcctggaagacgtgcaggccgaaaaagagaacgagattctgcgcgatatcaagcagaacatcaccaagcacatcaagtggaacgagggatacgtggatcacacccgtgcaccactgtctccttctccagaaaggacattcgatgtggctaccttccgacccgcattcacggcacagttgcccactcctccatcgtcagaatcatctggcgagatggagacctccttagacgtcactagcccgctattctctaaagacaagcttgcatcgcatgacatggagatgcacgacgtaccacaccgaatgccatctttccgacgacgagttggacgtggtggtcggttgatgatcgatcgtcgcaacatgggagcaaataaagttgagatggacccactcaaggccgaccgattcaagtttgaccaagaagattccgacgaggaccacgattatgacacagatgcgtacagcatccaaatcatgcagcatcgggctattaccatggccaaggcgcgcgaacaggctgcagtggctgcccaggctcatgcgcaggcgcaagcacaggcagcccaagcccaagcacagcgccgactgctggagcaaaatggtcaccaaggctctatggggtcgaacctcggaccaggtgccgtgacggtgtccgaaacctgaatgactcttctcctcttttctcttccacagcatttggcgggcgttttcttcgtggctctggcttccctcgtggctcggttcccttcgtctctttatccttttttcccctttaacacacttgtagttttattaccctatcatgtttcatgaattccgcgggcgggctggtttgtttcttctttttttgcgtttccgctcacctcctcctcacacatctctttcttgacatttcgtttcaacgcaggtgctagccactcatggctaagtgcgtctgcatttgttagtgtacatagtatttttttttctcccgaatctcggtggtgttggctggtgtcgggcagcctttgtatgatggataaccgaagttatgatgcaagcgacgaatgggagggcaaaggaaaaggctcaaaaacattcagaaaatctaaaacaatttaatcactcgcaaaaagcacttttttttggttctgttggggttcagtagaacagactgatatcggccagagtaaatgcaagcaagagcaaaaaaggggctcacatcctcttagtcttggactgtcgcgattcatcatcatcacagttggcagaacgtttcaatgaaccagaagtagcgggctgcagcatgcccaagacagcctgcaagacctctttctcgccaatgcggacctgcaatgccatccgtacgcggcgagcggcctcatccacgtgaccagattcaggcaacggagaaagcgaagccctaaattggaggtccgaggccaacgacgtagcatattgtgcctgtcgcttttgcagcgccttgattaagatggcggtcgcattggcgtccaaaactggcctgggagccttgtccttagccacgcgctgtttgaattcctcaggggagagagccagggtagccagaaggaccaccaactcggctggcagtatatcttgcaaagacgggttggcgttgacgggtctggggatcacatagccgtcctcgaggatgtcgtgacttgagaggaactctagtcggggttgggactcggtatctgcgttcgcaagccctgcggcttcgcagatagtttccaatgatatttcaagtacgtcgtaaacagcgtagttatcggtcacataaccgtaccggcggaggagatctgcacgggggatctctccgtaatcattgaagatttcctcgccttgttgaattggcttgattgccttcatgactaaggcgccttcttcttggtacagacgggcctaacaaaaggggttaaaattagggttgaaaaaaaaatttatcgtgtccaaactcacgttgtttcggtcagcatcggcgttaaggagatccgcgagcggcaccaaccccttaggcagctgctcttcctcttcgtcatcagtcatgtagctctcctcattggcctctccttcattgtcatcgtcttcggccttttcaatgtcaaatgcataggccataatgattgaccccatgacatggcccacttgaatgagggcagcgtcaccagcatcaccttcccaagacttgagaccaaaaggaggtgggaagagatccggcctctttgccaaaactggagcgatggaatcccgaattgactcctcggcgtctgaccgaccaattttctccaaaatagtactagcctgcagctcctgcagctcggcgggcgaccaaaacatcagggtgtcaaaacgagagggcaaaactctgaaatatggagcccatcttgacttttctccttgcagatattcatacaccatgaccagcatcagagaaagccacggacccatctgctcctctaaattctcgccgagcaggttcctcagctccgagttctgcacggtgaggaccatggcgcgcgggatagagaatagttcttcaccttccgggatgttgctttgtgccactagagcccgggcgagatattagagactgactatgagaattatgaaaccttcatttttggggagactccgtatgcacttttgtgtggtttaggagtatattctttcaagacttaccgacaccacgtccagctccagttgctcggagatctgcgagcctcagattgggattgagccgtacacctgggctggcttgcagccatgacatgaagttgtcagactgttgttgaaagccctcagcgtcagggaagtgggctgtagaagacatggcgggagagatcccctgggagggaaaggaggagtagggagagggtgtgaaacgaagaagcaaatgaagtggatacaataggggaaaggaaaataatggagaagaggggaaagaagaagaccgtcgggagtatgcaaagtagagagaagggtagctcgggtttagttcgggacaaccgacgggtgccgctttaaaggtcgataacgataacgaaaatcagacgccgccgcccgaggtctcatacatcgcgtatgaaggtattggctttcacttggtacagtctcgttgatatcttgaaataccgcccatcatgatcgcaattggtatggaaggctcggccaacaaactgggcatcggcatcatgctgcatcccaaggatggcagcgccccgcaggtcctcgccaatatcagacacacctatgtctccccaccaggcgagggcttcctgcccaaggatacagcgcgccatcaccgatcatgggttgtgaagctggtcaagcaagctctcaaagaggctaaggtgtccgtcgacgatgtggactgcatttgcttcaccaaaggacccggaatgggtgccccgctacagagtgtggtaatcgccgcgcggatgttgagtttgctgtggggtaaagagctggtcggggtgaaccactgtgttggacgtaagtacttatgcaagctatgtcataaaccgtgcctcctatttggagttggaactcgaacaaaccgctgactatgtgaatctccagacatcgaaatgggccgcctcatcactggcgcaacaaacccagtcgtcctatacgtctccggcggtaacacgcaggtcatcgcatacagctcgcaacgatatcgcatcttcggcgagaccctcgatatggcagtagggaactgtctagatcggttcgcgcgcacgctgcatatctccaacgacccagcaccaggatataacattgaacagctagcgaagcaaggaaagcagctagtcgatcttccatacgtcgtgaagggcatggactgttcattctccgggatcctggctgcgatcgatggtctcgctaagcagtgggggctaggcggggaggagaaggcgcgagaagatgaacagaagacggttgattctatcaccgcggacgagtcattagaaggcaagcccacacgcgcagatttgtgcttctctctccaggaaactgtcttctcaatgctcgttgagatcaccgagcgcgcaatggcgcatgttggatcgaagcaggttcttattgttggtggtgttggctccaatgagcgtttgcaggagatgatgggtatcatggcacgggatcgcggtggaagtgtttacgcaacggatgagcggttctgtatcgacaacgggattatgattgcacaggctggtatgctggcatacgggaccggattccggacacccttgagcgagagtacttgtacccagcggttccgtacggatgaagtgtttgtgaagtggcgggattgatatcgatgtcttgtttgaaccaaaaataaatctattatgtgttatgaattgagcgactaatctgatatcctttgaactcggtcggttaaatttgggaaaatcatatccatcactcatctcaagcggttttcaaaccatttgtattattgctgcataaatcgaagcgcctgtacagctgtaaaatcccaaatcccctcccagcacgaaagtaacgcctgaaaaaatgtgtaatatgtggtgatctcctcactagacagatcgttcaacggacattcatgtgtattggttgtggtcaatgactgggcgatctagtaataggatctagttgccattaaggaacccgagaacacctggacagacaggaaggactggcgagaaatgagccgaacaaggcagggaattgcttggaaatctttttatctctgcaaatcggacagaccacaacatgtccgaggcagtattcggtaaaataatgtatgcatgcaattaaaagaaccgcctatatgtttggacacagctcattctgtgacatcgccagtcggtttgtacaaaatagtcgtgacatactgcagacagattagttaatccacaaaggtgtatagagcagtgacttacttttcttttatacctggttgtcgcgcttgtagccaggacaccgttcttgatactgctcgtggcaaggtgattgaggacagtgtggttcggatagttcaaaacactgctatcgtctttcatgggagtcgtgccgttgagaattgacttacccaagaagagaggcagactgggaggggtagccgtatctccgatgacattggcggcctggaaataggccgggctatcttcttccttgtccaggtcggccaagaattgaggaatggcatcaccgaaatcaccgggtggcacctcttcctcggtttcttccttttctagagggtggtcttcggtatgtcctacaacctgcttagaggcatctggcaccgtgtttggagtttgagctcccgctggaacggccgagtccttgtcatgagcatcatctgcactgacttcaatgtagttgaccagatgattagtaaagtcgacggcagtcggaagactatccgcagcgcgcattgttccatcgacaatgaatttcaagtggtgcgtgccaggtcgaaggttcagagtagtagacatgacggacggatttttttcactatcgagtgttagtcaagtcccggaaatcctagcctcatcatttgaccaaccttctgtgcagacggaacttcttctcccagttaacaaaagttccagtgacgtagaccttctgaccaggcgctgtccattcaataaggaccgggacggccttgcccgcaccactgatggtgtatggctggagctcatcaagcaactcctcctcttcaatggttgtatgacctgaagccagagtgctcggatccatccgttcgtctaagaggcgatccgctggcatcgactggatatgcgagtcctcggggccggcgacaggcgatccgggcgtggtgttggcatcgccaattggcaatggcaggcgtggtggatgttgtaggtgggccgatgcgctatagtacgaattgaggagcggggccgatggtgccacaggatcgcgccccgggacattgcgcgagatcgggacttggaccgggttggagtggtcgcgggatgggatgtccttgaccgcggagggctcagctcgacgtacgtcttgtggcgaagccttctctatgtttttgggcgaagattcagggacgtttcgggattgtagacgttcttgcacggatccttgaaatcctgccgagtgcccagcagctgtctcctttgtggccgaaggatcggccacggtggtcttcggggccgagatcgtgttgagagaggatcgacgggcgacttttcgatcgcttgtagagctgtggtgggcatgggcagacggcgcgtcgcccaccgggcctttggaagggttgttgcccatcgaaggcggggaaaggtgcgatagccttgggccgagattttgctgggaggtggggaaaggggagggtcaaactaagtcacaatggcgggctaagaaagaaacttccgacgccagctcaaagtaaggattggcggtgggcagtagtcaaagtcgattgatgtactcgcattgtcacggtacagtagacgccgatgacgccggaatcctaatccggcaggttagggcttagggctttgaagttggaccgcggcgcgtgttacttggatatcataacagtcgagacgcatagttagatgatttgccacatattttcataataatcatgagttgggtatcgatcctgaaatatcctctgttgctcgttgttggctttataatccaattactatcctacttgttgtcaactctcctcttcctcgcatcgccagtgatctacatcggacatgtcttcttatacctggcactgcttccattgcgtatcctcgtgatattagaggtatgcatatctaaatatcgtagtctttagtggtagcatgtactaaactctaatagggattcatctatttcatgactgtggctgtgcttgtcggagccactataggcatgatcctacattttaccggcagcgtcatatcacaattcctgcggattgaagagtcaaatgagccacggcgacctcgggtgaagcaagagcttctatattctgtgccccaaaatcattctttcgactatctagcagcgcagctggatgatcgcaagttcctgccctactcgacgatcttggaggaggaggagaacagctatgagtcaggctgatgtgcagatatctcaagtctagtgcataatatttctatgcctccggtctggcgctttccaaatggactctctattcttaaatacataagcctggatttcaggtaccgctcgctcaagccgaaagcatattcttgatggttgtttcaaactgctcaggttcgcggccaagcagtcgcgctagatttggagtaacaaccgcacattcaccatcgcggattccatcaaaagcagtcgcccagagaggcgcccagttgccaccaccatatgtgagaccattttggacctgtggctgcttgacgtactcgtccacggatacctgtcggatcttgattggcttatttagcacacgactgaatacatccgctgtttccttgagtgaccaagcacgagggccagagagaaggatggtcttgtttaaataagggaaagcagcgggatcttgagcgtgttgtgcaatgagttttgcggttgcttcccccaactcgtcttgtttagcccaagccaggccaggagccgagccatcgtgggggatacagatctcgttagaaggagctttgagatcgaaaaaggcagtatagagtgggaaggactctgaatacaacccttcgcgaacgacagtatacgtgaactgtgggtcttgagcgtgtagctcggccagatacttctcagtcgcaatgtgggcaagcatcacttgggccttagtattgagatttccatcaccggcaaacgcaagagacgagtaaaagatgtgcttaacgccactctttcgagccgcatcaatcgcggacttatgtacctatgaaaccagattagactttatgcgtcgaaaggttgtgggaaatgtaggaataccttaaatcgatgctcgttctggatactagcataggagatcaagtttaatgacgaaattccgtcaaacgcatggtcgagtgtctcggcgttgtcgtaatcggccttacggatgatagctccagcggctttttctttgctgagtttccctgggcggcgagcgactagcaccacttctttagcagggactagctcaagaaggtgcttaagggtactgcctccaagacctccagaggctggaaatatgccaagcttatttgccatcgctgaatcactgatgaggttaagaggaagtctactgaagtttactgtactgcttttatatccagcggatttgcagtgagactctgaaagtctccgactcggatgaattaatgtcgacttttcagctctgacatccagtggaagtccacggatggactcagtagttgattagtcaacatatacttccaggactacttaagtatcatggatatcgggaaccttggaactctttgtatgatatcatcaagttctcatctctgtcactgtgcagactaatcaaatctgggaattcttcaggcgtgattaggcgtgagatccgatttcggtagactcggacatgaagttggtcaaagcggggggtcttctcggagacattagaactaactagctcgaagaaggcgctggattacaaattcatagattacacgctttaggaagaatcccaaagagccactgcgaaggacagtggagtttgcgtatcgtcagggccaggatattggcatccagcagacacatggatgcaaatcaagcactaaaatctgtttcattctttcgagtccgaccaagaatatctctcgagcctagtgtataatactgtacaacatgataaggtacaatcgagcttactatccctggcgggtcggaccgctcatcaaactactaagagccccaggcaaggaggcgacctatcgaatcttcgcacaacatccttccacttgagatatattatatgcaccgactttgcggtctagtagaccaacgccccctatattgcctaattgggccacatatgcgatccaaccaatcacattatacacgtccagtttccaacaataaaaggtacggtgatgtagcatcctcaaatctatgtttaaataggtactctcttgataacaccaatctcagcctagaattgtccgatgaacgcagataatataaagagtagatagagagcagttcccacaatttcccgagctaagtacctacccgatccagtcatattgccgcattgctgaacttgaattgtttaaatactcttaaataccatcatgtttggacataaagatacaagaacagacttatgcggtcttgtcatgtcttgtcttgtcagtagtctttctagttctctttcagtatgtctttttctcatgtcagtgttataaccccaaaatattgtgaaaatggtttggatgtaacttaccgaggtacttgtatgctataaccaatcagtaaagccctacggaatacatgcaataacagctgcgaaaacccgcaacctcatgtgatgtatataattgaccatgtatgaagtacatatgcagagaatgtgacagcctaagcccatgcatactcctgctagaggtcgccctacttttaaaatagattgggtctcattgcattgccaaaagcacctgaggacttcttggcttgttttgtgagattcccataaactgatcttctccaccttctacaacatactccgcacgggaacatctatatttccctctgctctttttcaaatttcaatcatgccgtccgactcgaaaacatcttccaagtatatccacacaagactatggtgtattcaccgcgctgattcttgctaactcttaggcaggtcaatctttgcaaacccgccagtcaagatcattgtgggcagtgacgagcgcatttactatgtccaccgtggaacactcgagatccaccccgcatttgatgcccgactaaaggcttccactgacgaatacgaggaggcgattgattggagtggctttgacgagcagactgttgattgtgtattgaacttcctttacactggaggttatcaggcacctcaaatgacttctgtggcagccgaggaaggtgagacagatgcgggggaagaggccccagcgcaagacggggaagaacaagaagtagtggtggaggaaacagaggaagcggatgaagaagatggtaataaaccccctcttacatcttcccatctcggtatcaaaaatatcgagacactaataccatgcagaaccacaatcaccacctgacagcccacagtcacaaacttcatggccacagtcaccatgtccaatgttaactgcacatccaaggattctgcaaccagtcgcggagtcccccatagccccagactcaccaccatccctggccctatcagagtgcgacctaaatgaccggcctctgactcctctagaatactgcgctggagtcactctgccctcggagcatgtttcggcgcaaaaggtcggagaccacgaaggagaagaccaagaccaggaagaagaaccagaacaagaagctgaagaaaatgttgctgagatttatctccacgctaaagtgtattccttcgcacggcaactcggcttcgtgaaattggaacaattcgctctgaatcgcctggccgaggtccttcttgccctagagcagacagacaagatcctattcccgtacttggtggatgcaatccgactggtctataagacgactagtactattgataatgcgaggaacttgctatctcagttcgtggcactgcggtacaccacgctggttggcgaggatctggacgaacttatcacagaggggggagagtttgtggtcgatctgtcgcataaacttgctcggaaactgacaaccatctcaattgcgtttaagaggattgaatatctcactcataggaatgaggagttgaaggaagaaagttctcagaaagataaagagctgaaggctttgagagaggaggttaggcatggaccgatacagggatttccgtctttcacatatcagatttgaagttgtgctaggcgttagtacacagtcaccgttcaatggactaatttttgggtattttttctttcctcggctcttctcatctctcacgtacatcaatgatttatcataggtatacgtgtaacgtgcttataggcaacccggacccaacccatgagccaatggcataaagcccaaccggatcctactgctcacattttctagcgccgagctagtgttcgccgatattgatttccgtgcgtttcctataccccacaaacccaatagttcctagcagatctttcttcagctgttcatgcaaagatattccggactagattctaatggcgtcgctatcacctcctgtctgctataatccctactatagtccctacttaatccctgcttagtgtgtacaggccgccatcgtggggttggcctccactgttgattttcaccgcatagcatgtccattccgttgggtgacttgtgggccatgtcctaggcgccgagcctgagatcgggcaacaacatgagacccgaacctgttctgcaagatcttgcgcattaatgatcagctgaagctggtgggtacatagtgggggcacgggtgatttcagctcagcaattgatttcattgaaattccctttctaccaccgaatacgatataagtaggaccttcttgcctggtcttagaatcttctatagtcagaaccttctacagtgaatctaattattatttcaaaatgtccacggtatgttatcaacgagtatagccacaaccaggtgaaaatacttcctattcaacggctcgacgctaacattctttgtgctataaagacacacgtttattttgaggatatagaggcatatacggatcacgcgcacacaatctatcagtaagtctatatacagcacagagtaaactcgtacaaccatgctaacaatgtattcaggatcatcgaagaggccggtttcgaaagagattcttatctaaggaccatgagctatcctcccgtcctatatttacccacgtaagtatctccttggcttcaaaggggttctgattatcagaacctgagctgacgtattaattagtgctcgcctcgatgatgatactgttggcaaattgaaggagtatggggtgcgtgttagacagggggatgaggattagatatagtcaggccgtcctttaccattggcctttggcgagcgacaagggctgcgctgcacatgggcagaagccagacgtggctgacggagagaggaaggcgatctagccagatctacagatctacagagcaattatagatggttccacaccggtttcagaagtaaattctctattattggttgaattgagacacgacagatcaggtgatatccgaatagtatcgtaagtcatgtgactacctaaagtagcttaaaacaaatagtgtttcccgtatgacctcgttgattatttggaacgacaggctgaccaattatatatagagctgatataagattgcctctctacatgaatccttcaaggcttatatacggccgaaaaagcggtctgtgcaaaagggataatcttccatttacattctggaaatggcatgtctccattgaatgacttgccatagctcgcgccttgaatacatgaccatcgacgtcattggaacgatcgtcgatcttatcgatcaagctgtggggtagaggacttacatccgagaccttccacgatgatcccgagatcctttctgcgcgtgcgagcgctgttggcagccttcatactcgctgtctttctcacctgggcaatattgacacagttcaaatcctacatccccaatatctcgtcttcacgggccattaccacagacctaacaccattacatcgccaattctggcaagaattccacgccctgctagagaaatatgcgccgggcacagagcctatcgtcgaatatcagagggcgcccacagaaggcttcaatgctcacaatgcaccgccgcgcccagataccctctacgttccggaggaagatatcacaaccatgaaagaagcgcatacggggttcgtcaatgcaatcgccgactccccacccgagctcccctacctccccaacacaaaaggcatagtctcaacagcagggggcccctacctcccagtgctagtgatatccctccgcatgctccgccgaaccggctccacgctcccgatggaggtatttctctccgacgaagacgagtacgaaccctacatatgcgatgtagttctaccctcgctgaacgcgcggtgcgtagttctatcccgcatcctcatcgcggccccagcccaaatccaaaaataccaattcaagcccctcgcaatgctcttctcctccttcgaagaaatcctcttcctagacgcagacgccttccccctcaagaaaccagaacatctctttaccaccgagcccttcctctcaaatggcatggtcacctggcccgacttctgggcctcctccgcctctccacacttctacgaaatcgcaaaccatccgcccccaccaatggacctgcgccagtcaacagaatcaggcgaagtcctcctctccaaacgatcccatctccgctccctcctcctcgcaacatactacaactactacgggccctcgcactactacccccttctctcacaaggcgccgccggcgaaggcgacaaggagaccttcctcgcagccgcgaccgccatgcacgaatccttccaccaagtcagcgagtccatctgcgccctcggccacgaaaccatccacggcggcatagccggctccgcaatggcgcagttcgatcccgtgcaggacttcgccctgacgagtcgcgggatatggcgtgtcagaggtgacgacgcccccgcgccagacgtcttctttatccacgccaactttcctaaattcaatcctgccactgtcttccagctccatgatgttaaccccgcgtttacagatgagggggagtatacgcgcgcctggacgctgccggtggatgttgtgcgggggttcaatgacaaggttgatgtcgagaagggattttggcaggagattctttggacagcttgcgagcttgaggataagttccggagttgggccgcggatgagggggtttgtgatgcggtgagggagtattggggtgctgtttttgggaacggttgattttaccttgagatgtcggttcggcaggtatgagaactgacattgctattctcgatttttatgtgtctttcccggaacgcataaccaatgtctctctccggttgttgaccttgcacgaccatggaataatgcactcacatattcccccgccagaggtgtgccagaatagcctctcagaaatgacctctgtcataagaaggtcattcttgccaagagcagcaacagtatcgagaagaaaacactcttctaaaagcattcgaaaataatgctcattcacagacttctacttcttctatatgcatctcatgtatataactaagtagcgagcctcgttgttgtgaacaatctccttcttttgctcacatttcaagcgagggaacgacgacgtagcttcaacatcaagactccccaactcccaacctaagataaagataatcctggataatcctcgcaacctcctctgactccttaagaggggaacgacgaggtactcgtaatttagcttatacggaaaaagtagatcgaggtgtggaagagtgcgctttggagtcgtagcatggtgcggtgccacgggctgtggagagacctatataatggaggccttgtgcaaatgtatcacttactttgtagttttagctagatcgaaagtaatggggatgaatggagcagtcggcgggtctgatttggcgggcgatgagtgcaagatatagagacagaagaaaggaaaatacagagaaacagaggaagagcagcgaagacacttcatatcagtgccgtttacacgatacacaataaacgaacgaaaccgatatggtatgacagagccaatgcgttgactatgcaatagtattcatcgggcatcacaaaccacaaacccagccatctaaaacaggtaagaatacacaagacgggatatctaagaaacaacgcaaatgggaggcagaacgaaaagaggcctatgctcagtatgaatccatgcatcaaccacgagaacagctaatagctaaacacacctcaacgcttcacaatcccgaggccctcctctagacggtcaagcagcgaattcctcgacccaaccgatgaagcaggtgacggggaccggtcatgcttggctcccgatgtagtcatgacttccggcggaacatacgcatcgacgtccaattgcattcccaccgtcagatccgcatctggagggagatactcaggagatagaccgcttgttatgatattggcggcgttggcagcatgggcagtagcagaggcggattcaaagaccgccccagaaccagagccagaagcagaagcagaagcagaaggagaagcattttcggcttcagcttcaggaggagcagcaacatccctattccggaagatgtatctgtgctgtacaggctcacccacaggaggatcagcctccaacttagcccttctggcgaggcctttttgtcttcggcgactcggttttttgccaattgggtaatcgtgcacgtttggctcgatactggcgacgactcggctgctcgttccattgtcaacgttcggtgtgggaataccgtttggctcctggtatttagcttcgacggtggcggcagcggcggcggcggcggcatccttagctcttttgcgcgccttgcggctcattgggatttccccgtttttcccttctgttttctgttgggattgcgttggctgggtagttgtagtggcggttgcggatcccgtagctgcagtgttcggggctattataattgcggcattcgccttggctctagccttggccttcttatttctctttgacttggcagttgtaggagcagggacatctctcgaaccatcaaacgttatgggatcgcttttagagccggcattcagctgctttggagcgttcaactgcgttgggaggagactaatcccgccgtcctcatcgtcgacagaatcctcgtggaggccgatgtccaaatcaaggatagttccctcgcccttttccacgcgttcgttccaggcgtggaggaccttgctcacgtcgtcgtggtgggcgagataatcgagacggcgaaggaccttattgaagagctcggtctcatcgatattaggatcattgctgaactccgggatctcaaggatattgtacggctcactagaagccttagttctgctgtcatcgataagaatagtgttggtctggtcccagcggtggcccgcggtgagctttgcagcctcggcatcgcgaagcctttgcttgcggttcttgtgcggtgtattggtgcctggtgatgaggcaggggggttttttagatgctcgttgcctgggaatgcgccttggatatttgtctccgcccagactttgtgcagctccttgtagacctggagctttttgttgtattgaactgaggtcagaccgaacttgtcgcgtccccagcgggcgacgatagcatcatgcatgggccctgggaagatctgctcgcagactgcctctacagtctgcggttgggagctggaccagatcatgactttgtagtctttgattagcgtggctaggaattcatctaggcccgtgcgtctggcgaatttcggggggaatttgcgaagcttgcggtagatgagggtgccattgagatcgaggataacaaggagtggtcgcttttcggtcttctctggcttcaatgacgcttggtttgtgtattgcagtgtgggaagcgggattttgactggtggtgttggcgagcgttgtctttggggtgatgcgaaccgttgtcccgtgccaccggccatcgtactcatagatcgggtattttggaagggtagtggggtattcatatcggcagggaaaggaaaaggtgggaatggcatcccgctatcaaagcctggattcatccagggcatagcctgtgccatttgaaagaaagtttgatccatgctcatggggttttgcggcaaagtattaaaagcgccgaattgttggccttgtcccaatggtatttgtggttcgtattgtggcatggtaggagcatagccctgagattgataggccggtgacgtttgattagcctgtggatgctgatatccaaagttcgagttcatgctctgcgtaggagtatactgcgaaggtataggattgccttgcacaagatagtcatatcccgcattacgatgtacatcccgaggggcattgcggtcccaagagttgtgtgagggggcctgccgacttcccccccgtccattctttgctgatccagggttcatgttcacctcataatctgaatcggcatgctggggaactgaattcgactggtgttcggacgtaggacgtcttttgtttgagcgggacagcttgagggaggtgcgacgtgacgaaaggagagtagagaatctccgggatttcaaagcgctagaatttggcactgcaagaagctatttaaaagtaagtcagaataatcaacaatcgacatatgctatccacgtagcgaatagtggaggcgatacctgattggctgctctgagaagatgctgagagtgacgcgaagagaaagtaagtggggagtgaggggaggctcggccacgcagaagatgcaggaacatttataaaacaaacgcaaattgcccaggtggttaagaacgttcttcccatcagggcatcgcgaaaaatatctaatcagttcttatcgctctgaccgccccaagcggcaatatttttctttttgacggttcttcctccgcggggttttccaactacagcaacaccaaaatggctattaccgatctgctcaatcgccgagtgcgagctcgaccagaagacgaggatgtcttctctgaagcatcaggttccgacgaggattcgcaagctggctctgatgccgaatccaactccaacgaatcagtaagccaaccatacatctacttaaaaccaaattaacaaacaaagcagcacgcagacgactcctccgccgaaggcacagacacaggatctaattccgactccgactctgaaccagacatagaagaaaaaccagaatccgaagccgacaacgacgacgacttcaaagcctcactagcagacatctccttcggcgcgctcgccaaagcccaagccctaatgcgcgagaagaacaagcgcacaccaaaagacggcaccaccgccgcctcctcaaccgtcgacgaaatccgcacgaaactccgcgaagcacgcgaagaaaagctcgcggcagcctcgaagtccaaatctaaagaaaagaaaagccgctcctcgaagcacgcgccgatggagcaatcgtccaaatacgccgtgacgcgcaagcgcacagcagtagaactcccgcccgcgccgcggtcgcgcgacccgcgcttcgacgcagccgtcatgggccacagcggcgtggggaagcacccgcacggcggaacggcgtatgcattcctggacgagtaccgggcgtctgagctgaacgagttgaaggagcagatgcggaagacgaagaacctgcagcagaaggagaagctgaagggggagattcggcgggcgcaggataagctgcggtcggcgcagaataagaagcgcgaggcggatgtgcaggctgagcataagaagcgcgagaagcagttgattcgggagggtaagaaggctagtccgtactatcttaagaactcggagttgcagaagcaggttcttgagaggaagtatgcggagatgggatcgcgggagcgggcgaaggcgctggagaggaggcgtaagaagatgacttctaaggagcggaaggagatgccttgggagaggaggggggcggagggtggtgaggatggaggcatgcctaatggagggaagaggcggaggttggagtaactttttgtggtatacggcgttgatctatctgggaataaaagcacatatagcatatgagtattgaatatctgtttacatgtccacgggtatatgttctcgagtgatgcattaaaatgaccagtctcggagctgagggccctgatggcaatagcaaaggctgaaaagaagaaaagaaggcattccaaataggccaataagaggcagagaactcattaccataatgctttatctcccaaaaacaagtccaaaaggtataatacgaagcaatgaacccgcaacgcccaaagcaaacttgatgcagaaaagaatccaaacacaaaatttttacagggtgccaatctgccctgtcaatactgtcgtggcatagataacatgaaattgatgcaagcatcattgggtatgatggaaggtttccagactcgatcgtccaggatgagtcggaagatggacattcactgcccaggcattgcattggttggacttgccatggaccaatgtcgcctgggacttagtatcaaaggcctttgcattccaaggcagcaaactcctatgagaatataagatgatagcatcgggatgatctgagggttaggcatttgccagcaagtaggtccaagcaaattccatcattacttgaacttgggaagcagagccggcctaagcctctacaagaggcatgagaccaacagagcatgtcgtatcacgagtggaacaaatcccaagcccgtgcacagagacccaggaattcatccttctttctccgctgcgtctctggcgaatctcttcctgcaccgaaaggtccagggaacgaagcatgtggaccgggcatggcagctggattgggccggtattgagattcgggaccatgacccagtggcggacttccgttgtcctgttcatactcgctccgagggcgtcgacgtgccgtaacatcggacggggcaaacataccaaaagaggctggaggcggaccgtggggtgcttgcggttctggggcaagaggcgcggtcttggggcctgcgtggtggacttgtggggatggcggggttggaggttggtggcctccatagtgaacaatgcgaggcagcagctcctctcgtccgccggacatctcttgcacggcctcttcggccgagtgatattcgcggggtcggctgggggtgtgcgccacgctacccggcagaccaggggagggcatcggcgccaagttgttagattgggaggagttgctgctcgatgcattcaagtggatattcgcccggccagaatcccggtcccgacccaatgcatcggaaccaaagacgtcggagaggggaggaagacgattgtttgtttgggttgccggcagctggtgcatgtgggaggtcgagcccagggtcgggctctggttgacgacatggcgggtcaatggctgcggttggtatctgccagtgaaagtctggtgtagcggagccgattggatgactcgctcgtttgcgaactgggaagcggatggagggacgatggacaggccgttcggaggtctgcgctttccggtcttgggcatccccatcaagttcgactcagaaggcttcataccgtccggaccatcatccttggcggatcggtgcatgcgctgttcaatgatcgatcgctgctgatcccgcacggagaggctgcgctgcagctgctctcgcatgatcggatcgtgggtctggaagccaggcgacaggcacgccaggcctacatggtgcattgaggcggtcaaaggtccccccggagcacgaaccgacaaaccactggaggatggaagactagtcgagaggtctaatttccgaggccggggccgactctgtatccgtggggaggatcccggttccttctttaccgtaatgtgcgggcctccgttgccaccttggggtctgaattatgttaatatgtgaagctccggttccatgaatctctcaacttacggggaagttggacctctcttctcggtcggggaaccgtgtagcgcggatcccactttagggcttttggacatccggggcggagagaacttggacggggtattattcggaggagccaaagatgggaggtttcttgggcttgggttgcgagtcgggtgtggcgatgacaagggggccgccgcggaagcaactgcggtagacatggtcgagacgatgagatcggttttaaggtatcacacagaagattccagtatatagtagttcagtgtgttcagtgtgttccttcagtgtattcactgttcactgtatattgacttgatactcctttagaagatgcaagggcatctggagtgatgcgggcaaagtccgaaaagcggatcgaaacgtgggatcgcctcagtatatccaagtgtagagatatcccacgagaagagggaagaagggcggttaagcgtcaagcggcagaccagagtccagagtccagagttacaagcgagagaaatggacgataaagaaagtccgagagggggtcgacacctccaggcttaggaaaataaaaaggaagatgagatcgccgaagctctccaggggaaggttaaaagaaattaatccggcgataaagtacacagtacgttgatcctccgaatgacaaagaggggaaaaaggcatcagcggtcaccccagctaagtaccagatacccgagctgcccggtggacccaactgagacacgatgtgtttctgtttaggatccaccgattttattgtttgaggattgggatatatttgtagagtacggagaggactgtaattagtataagagtgtatgttgtaccttgtgttttgcacggaggtccctatatgtactaaatcccactattaacaatagtcctccccaactactccgtaccaacccttaacaactatatttatctcgcttttacacttcaataattcgctacacggtggatcccttctctaacagtagtataacaagcaaaccagactagcacctcctgataccaaatttatcgaatcacatccccccacccaacctcatcctgtggacgcttggcagagaaaaaaaacatgtcacatcacctccatccactcgcatggcgttatacgtcaaacaaggcgcagcgggcgcttatatcaaaggggccactagtgtgtggcgtccaaagtcatgcgagtacgaaaacactgaaactgaaactgagactgagaataattcagttattctcacgggttacctatttcgagcatcgctattccgtatagagtaataatagaccctggcctgcctctgaaattagaccgattggcctcctgtcacggcccttgtagatgcacagaccaggggtgcgtgccttgagttgcatatcatctgtgcagttcttagggtgtcgatgtgagatgaaatggctgaaaccgacattaccttgtttcatactataatatacatgtaactattgagattctacgtttcataggatattattcatttaactatcgggagatatccatgtaatatagttaaacctcgtatacttaacccgtcatactgcaggtatgttcaaagagggaatcattatacttccacaggagtatcttatcgtctacggaaaggatctactcccaacattattctgcgcatagtgggggactaaatggttgataaacactgcgtgatccaccacttcgtattattataagaacctaggtgaagacttttcaaaaatacaaacattatcacataaatctataacaatctaacattctaacaatcctattagaataatcacacccttaatcttcgacaaatgcaatttatagacaaaaacagtaggcggtgagacccgactatcgataacccacctttttttcttcgcgataatcttcgacttggagatccaaatcgcgcaaattcgttaggccaaagtccaagcttccaagccaaccgccagcaaagacatcaaccgaccgtcttgcaaatcccaaccacccaccccaaatcccaaacagccaccctcacaaaaccacaatgcctgaatccgtccactcccaagacctggaccagtccatggtcgacgcagagcagcccgtcgagctcctccagtccaacgaccccatcctcgaggagcgacagattgtcgtggtacgtatccgatctgcgcgggtacccaaatagacctcgcgatcataggcctaaagagagcatcaagctaataccatatttccttacagctcgccggcgccaccgaaaccgccgcttcattccagtttgaaggcgaaggtcacactatgggtaatgcgctgcggtatgcgattatgaagaagtgagtgtattgcgctgcgagactagattcggtgtatcgatgttttcggttcatggaattgaggttgaaggtttcggaagaacgtcgctgacttgttaatagtcctgccgttgagttctgcggttatactattccccacccctcggatccgaagatgaatgtccgtatccagactaatggtatgttctcctactgctactttcttgttctattgccggatactggatgtgggatgtggattttactgactggacacagatacgactactgctctcgaggctctggaaaagggcttcaatgatctgatggacttgtgcgatgttgtgacggagaagttcactgcttcgcgggatcaatttaatgcggagagtgggaaccgtatggaggcatgaggtggtttgtttgcatatgtattatttaattggcgttctgggtagggggaaaagtatattttctagctcgggcatgacaagtgcttttggttttttggtgtatagtttaagaaatacttgatgaacataacgaagttattcgtgatgcattctacgaacttattaccaagatgtgtgcagccagcagcaagtctcaagccaggcttgacaggaacgagataagataatggaatggcttattcagacaatatatacacatcatgtctatcgatggcgcagttccttgaactgccacatcgcggaccggaaacgagatgaaggggataggaaatgggagagaaaaaaacagaagggaagctttaattgcgaccctcgaggaaaccagagacaaagttggggggtagccgtgcgccaggatcttcctctgggcggaagtacttcatgacatgagaaagctgcttccagtagttaagggtttcctaggttgatatgatgtcagcatttgatcttgaattgcagggtgactacaacaatggataatcaaataaagacgagaagcattagttctcataattgtcttcttgaaagaatcgcatgttgcaaaggcatattatatacaccgggacagaggttggacctggactaacctggtactcggcgtggctctggtacaacagcacatccacgactggcaattgcttgacgtagcgatgtctctcgaactcctggcggatcttcgtgcggatggcggatacaggcatgccgagggagtacatggtctggatctcgggggactgtacggtgataccaggttagctgagtccgttgcgggtcaaattgtagcctttgaagccaggactgaaaacgagccactaatcaatccgctcctgcgatatctgccaggaacggagtaaagagcatatcaagggacaaggtggatcgtctaggatctcggggtaaactgaccgcgcggagccattcccggtacgacttcaggactcggaatttcgcatcgccccagttgacagctagaaaatgagcagctatattagcaccgtttcgcaggtgggatagactccgctgacgatcccgccgggtggacggcggaacgcatcgggcgtgggagggacgtacaggagcgcgagcgctgcgccagataggtagggttgatagtcatgttgaggagagtcgagtgcccactcaatccagcgtggttcaatcactggtgcagaaagacgggagggaattgaacgtgggttccggagctatgagggtggaggtttcgatctgaggttggtggtggaatgggctaggctcaccgcctgccttttcaaaaaaaatctttgcgaatttggggattatcggaccgtctgcgcgacgttctctgctcttgttttttttctgtcgaatatttttcgatatctctgattcggttgcagagtttattcgatttttcttgggttgttgaagtagtcgcaactctttctcgccgctctatcaatctttgcattcctcaatctctgtccgcctcgtctcaactcagtcaattcttcaagcactacgaaatggctcctaacgtcggaggtgccaagggaggcgcaaagggaggcgcaaaaggaggcgccaaaggaggtgcaaagggaggcaagtctgccagtctggcggctgcctcgcgcgtcagcaaatcgaaagatggtcccaagcgtccccccgccaaggaacagaagaccaagtcccggactgccaacgaaaacctgaagagaaagaagaagagagtatacaccgagaaggagctggatctgcccgagttgaaccaaatcacacccgttggagtgatcaagcccaagggcaagaagaagggcaagactttcgtcgatgatgcggtacgttttgcttcccatgctatgttctcttgattgcacctacggaagtcttatactaatactatcacctacaggagggcatgatgacaattctcgccatcgtgaacgccgagaaggaaggccagatcgagtccaagatgatgaaggctcgtcaattagaagaaatccacgaggcaaagagggccgaggccgaggcccgcatgaaggacaggaagaacaagttcgacgatgtcaaggattccattcgtcaaaagaagaagggcaggggtgacaagtccggggagccaacgagtatcaaggatagtatctcgaagcccgggcgatcaaagaagaagaccgttgcatttgcttaaaaaaagtctgaaaatttgtgtctatactttgattatgtatttagatgtcggggttcggcgttttcaccggtttatcaatctatgtctatcggaacagaaacatcattttgcataaacaccgtccatgctgtggttccccttgtaacccattatgacctgtcgcttttgaacctggtgattgtagcagttggttgggagggcagaatgtttgagaggcaattacagagaggcaattacagccccaaaggtagtgcgagtttgcgtcgcatcgagacgtattcaggcttaggtgctaggtcaggctttttgttggcgtcatcgtggtaggcaatgtttccagggagtttttcagggtgttcaacaacaccagggatactagtgtcaatttcccttgccattttgttgaagaagttcgccaccttaaggaacggttagtatgaagttaactttcaattctaatgtccattgcgagttacataccggcttgacaaaccacctggaccctccaagctcgaaccagccgagatggccaccccacgatgtagtcaacatgactccatatggcgtttgagtcatttcctggtagggcaaagcctctcggcaagcaatctataaagtcagcaatctttcaatggtgacaaaaaggacattgataacttacaggatcatcctcggcttgaatgctaaggaaaggaatcctgatagcaagcatggaatcggtggaagtggcatcacggtaatacgctccctcggtggggtagccccaggtcggacattgcagagctctgttgcatgttagaatcgcactcttttggccagaattaattcttcttaccggtcgaactcatggaggtaggtaatctttcttatcgcttcaacatcgatacgagggtttgtcgagacttgatcaacatgtctgtttcacttggttagttaccttttctcatcagccgaacagagagttactcacgcctcgaagagcttcttcatacttgaccccatggttctgctgtatacctccttgccaatccaggtgctttgcaaaatcatagaaccaatatccaagttccacgggctcgcacaaatcacggccgccttcagttgacagttttcaccttcctctcccagatactacacattttgtcagtgggtatagacagtcaggtttgcaggggtcatacattagtgaggatgttggcaccgagtgagaagccaattccaaaaagagggcgattagggaactgcgccctgatccacttcacagcctggcgaacatcccaagtagctcgagcattgtagagaacaccggtactgatgtttgtctccgcacatcctctcgaattgacaacacatgcttcccatgcgccatctttcacgagcggtgccaggacttcccgcaggtatacttcatgggagccaccactcagcccgtgcagaagcacaagcatgggcttggtgtcatctgagggcagcgcagcaaattcatccttagagaaaaaggatgtacgtgatggcagaccacacttttgcgtatactttctcgcttgatccgtaagctccgggtcttgaggcatgtcgtacggtgcgaccacgaaatccatggcataatggcccgagaatgcggggctatctgactcaaaaattttacgtttgtagtaaatggggacatcgtcgtatttcatagttgtccaggctgtctgtaggtgcccattgaacaagaaagggtttaggttgcatgtttctggtgttgcagaccgacagacatccacgaaggtagttttttctttggcacctccagcaccgcagactttggtcaatgtcaacttattgtccgtggcgtgatggaaagctatgcggcccttgggacgaagccatgaaatcaagcccatggcgattagtccggataagaggactgatagggggattgaattcagaagggtcgagatgaggtcgtgcatgaggaatatctaaacactaaagaatgctcaaatcaaataaacggacaaattgatatccaatgactcttagaaaagaaaaaagcaggcttaaaagcacaatgctgatcgaaggatctagagcccaaagttgatatggatctgacctcggcaaaaaattatgttcggattttccgccccttgcccatggttcagtgtgactaagctgattttatgcctttgtatgtgatacatatagttatgcacgatatgtcaggtgatctgtgtcgcaaggatggcttagtcatgattctgagggctgcacgggacctgataacataacatgcgggcgtttttcgtcatgcacgtagtcagttgacaatgtcatagcgcagacacggctgagattaactttgatgcaggaaaccctccttatctggcgcagttgggaggagttgggggcattccgccgaatacgaagtgatgatgatatgatgctcaatgcggcaatcgccttgccgcatgcggaagccctaaatgcacttccggcgtcaagcacagggagaaatccccatgtcttccgacaatagcaatgtccttcttaaatcgaccatggtaaatgtagggtggaaatgttgaagtatccggtgctctgcatatggatcatcagacaaagaacggctaagccaccaataatcagttcctctgcctctttatatgtaatgctgatagcatttacacccatcttttgtgacctagtcccatggtccgtttccgggaatctttatcttccaacagactacttcaaggtcaaaggacctgaacctgctctcttttcttttgaaggtgatgcagcactggttgtcacacgatgcgcttgatgtctactacagcatgataagagtcgaaacgccactacccatcttgctgattcacaatctctcatgaggcttggtcactgaacatatttgagcgacctttaatctaagcatccatggctttaataagagactccccgtccgatatgtccgatcgtctgtaccgcgctacaaagaggttcaagaccatcatcaaaatgagaccctggtcaaagaagcaacaggagggtggccatggccgttgctacctcatggaattacccaccgagttgttgctggagatcgtatcccatctgacagtgttgccggaggctgcgcttgcactgaccaacaagcgcatgttcgcaatctccggagagatcctactctcaaaatgcctccgtttcaatcgcgactttgcgccgcttttccaccattaccgcaatggacataactttgacacgccccggtgggcattcctcaacttgttggaaaacccccgctggaaactatgctccaagtgtttgaaactccaccctcgagccgcattttcatccagagagttgagacggaagccagaaagtcgaacatgcaatatcggagagttagcaggggttgtcgatctatgcccatgcaagaaactaactttccgcgacaaactcgatctcgcggatcacgttcgagtgcgacaggtgacattgcaagccttgaaatcacaatttggggacgccgttgacggccgctactgctggcatacatgcaccgagcagtatggcgcaaccgagctgaagacatcgttgtttccagaaatcaatgccgacaaccagctagttcttcgcacagaataccaactcaccaccgagtcgggccaagtgggcaaggaagattacatgacaccacgcttcggatgtgcacatcgatcggtcgacctgtggctctcgagcgttcaccaaaccacgatatgtcgcctcttcgactcttcctgcccgtcctgcaagcgtatatcggtgtgcagcgcatgtgatacgagattgacatgtccacgaaaagcaccattccattcggagaagtctggcagagcgacctattcattctggacccaaagaagcctcggggggacgggtccagctcctgatccggcatggggagcacaaagaattcatccagccgaaccttcagtcagtgtcgaaaactgcaacgagttgtgtccctggacagtgcgcgagcatccagcgctctcattcgcgccgagtatagaacgggaaataatcgactctggaataggtaaccaacccatcaaccaactgtacacatacatcaacatggtttaacggatttgttcagctgcaacagaggcctagagaagccttgggagctgcaagataaggagttgatggaccaaggttcattttttctctcgttccgacttttgtctatatgttgtatagtgagcatcgtttcggcgttagattaatcttttgttagcatcatgtatttagacatattcatataattcaaccattcaaccattcagagaagaagtgactcccacgtccttatggtaatctttttggtggtctttttctatatctctttttctgggtagagggcggaaaaaacgacttagtctgtgaaaacaactttctatatataacctatgacaaggctggctagtaacaagaagaagagcgagaaacacacaaacgaaactaaaaagcaagcagctcttcaccacacgatcgaaatcgaaagtgtttgagtgcatcagccagtcgtaagccaatattccaatcagctagctcattcttgaagtggacacactgacatggcctttagtcggggctcattacacagaccagcatgaataatcgggttgattaagaactagtatcgtgataccataataaatgacacttgtattcaaaataggtgtcaaggctttggctagtgccaacacttaccttcttttggcttcttttgcaaggtcctttgttggagtcctttggatacatatcctttggcttatgcaaatgtctcctcggttgaaaacagcttaaagcccaagccaaagacaacctataaattttcagatataaagaagtcctatacttcccaaggtcaatgaagtcaaggtaaccgcaacaaaccttatcagctgaccgcccgtggtttatccggaccgacaccaggctccacgcccgcgctcaccatcccgcgcgttcgacttcatactcgatttatacgagtattgttcgtttctcggggcaatgagctacccaccacctggtcccggccaatacccgcattatctaccgccgccacagtatcagcatgggcaaattcccccgcagggactgtacaatagccttggtgctccgccgccatacgataatggctatggcaagccattgatgtatccttcgactatgacaccatacccatcgacatataccccacaaccgcagcagcagcagacgcgtcctccgcagacttcaccgcagcagccgctccaattaccaccacaacctctccaaccacggccacagccaggaccacagcttctctctcaactaccatctccccctccaccccagccgcgtcctcccccgcctcaacttcaactagaagagctgcaacatcagtttgtaaatccgtctcaactgtttgtacaacaacctctgcctactgctccgcgatcccgatacacccaactctctcagtatggtgaaccagctttcgtcccaagttctagtcctccaaaaatatcaccggctgctctgccagctccgccgccagtcaggcctattcacattgctcctgccccgtctcctattactcctaaaccaaacacccaaaccaaccaaggacaagccaataaccatataccgcaaccacgccctatcgtcaaagctgaacctacgccatccaagatctctcccaaagtaaaacatcagaaaaaaccttctacacctatttcgacgccgaaacgaccccagcctgctccttttccggcgacacaggctaccccgcaagtcatggcccgagctccgtctcctgttcaagcaaatattcaaaaccagactccgaagaagcaagttcaaccacaccatattgagaagaagagacagccgactcagccaaatgttgaaaaacattggaagccgacgcctaccaagtctacaaagcctccagtcgactatcaggttctgctgttatccctggctgatgaatatttaaatgctgctcatgctcgtggaacaacgacctcattgaccgctcgagagactgacgttgaggaatattacaagctggttgctaccggattgggctgtttggaggctgtcttgaaggttggtgaattgctctattctaggaacagcgcgcccaagctaaacaaatgatagaactggcgactgcaacctcgcaaagaagctcttgttagacttcgctacgcgcgtacattgtttgaggaaacagacaatgacattgaagcggaaacagcattgagtaaaggggtgtgtatttgtttccctctgttccagaatagcactaactcgagcagatcgatctttgtgaacgagtcagtcaaccgaaacttaatagcgaattcgttttgatttctgactcttatagaaccgtatgcttgacttgaaatacagcatgcagcacctgttagctcgaatgctccataaaagtaaccccaaagcttccttgaaagcggttgatgggatgatccaggatgtggaagcgtatgtgccattccacctttgaccacgggatgctaatatctgtaggtaccgccatgccgcatgggagtacgcattccgctttcttcgagtatcactttcgctgtcatctccgtcacaccaagactccgtgcaagcgttgcagaatcttcacaaaatcacggctatggctaatcgtaacggggacaaggctgtttcggcaatggcggctgtcattgaatcacttgcacacttgcagcaagcgacaaattcggattctatcgagcaggcgcagcgcgccgtggctgtcgcgcgaagccatcagctgaacgatgaacttcgccatatacctcaacttacaaccttaattcaaatggtcgatatctgttgtagtcttctagagtacgacgtcaaccagtctggacagaagttgaaggtcatgcaggctttgatggatgagacactaagcgacagcaactggcgtcccgatgggtcattttcggtccctctcaacggtaaatcggccgggccatcatccatcgacacaggtgacatcttgcaggttcagaatgggacattgctattaagcttcaactggctccctcagcacgatctttatgcgctttgttatttcttaagctcaatcacactcagtgccaagaactcatatgatggtcggaaagccgagaaatatctcgaggaagggcttcgaatggttcaaggcaatttcaaggccccccaagaaatttcagaatccatggtcaatgccaaccgtcgggttcagtggcgtcagtccctttactgcaaccttctcctccaacgagtcttcctggcttgcgctcgaaccgattgggagcttgccagccagactctcaacgaccttcgacaagtcttccaagagcttggttctaacctcctaggtaccattgaatgtctgatggaatatgccgccgggactatcgcacaggcaactggcgatctcaataccgcgctgaacatattccaatcaccaattctgtcactagaccccgctaccagcaagacaggacgcaatgacccctgtcgtgatacgcgcatcctcgccggtcttaacaccgctcttatcctccgtgatccaagtcactcatcgcacccctcgctcagcgcccttctagcaacgcttgaacccttctgccaaggcagtccaaacaagtatatacaagctgcctacttcctagtctgcgcaaccgttcactccgagtctaccatccaaaccaaacagtacctccagcaagctctgcagtccgctactgcaatcagcaacagccaaatcacctgcatgaccctaacattcatgagctggaagtatttccgcggcgtggtcggcgagcaagctgagaaaagcgctcgagccggccgtgcaatggccaaacgagctaatgaccggatgtgggcgagcgtcaccgacgacatgctggctgagaccctggagcgacagggcaagggtgaggaagcgcagagcgtccgcgaagaaggccaacgcttggtatcgggtcttccgccccgtctgagacgtccggcctgattggcttgtctattgctataaacatgatatacgtttttgtttttttctatgtttttctttgcgtttgtttcagaatttttcttaggaggcgctcgtttacgataccatttgatggctaccagggaaggcgtttgatattctgcggttattgacacggtgatattattggcgaatccagaaatacctttctaatacttaagcacggaagtttacccattgatgagtaggaaacgttgacttgaaaccattgataggactcagctcggtgtatatcacaccctaggaagatcactttcgctccctataaaaaagaacatgaacacccgacatcatgcgtaagtacaaacaatatggtataaaccaacccgctgtcacaaaacacaagcttcaccagtcgaagctagacgaaacaaaaaaaaagaaacaaggacaacagcaccgccgaagtcaactccatgcccacaatacgccagcaatgtccaccagacctcttccctcatcaacaaggaaagaaaggccaccctcacacgacgaaattaatattaaactcgaaacctcccccttcctccacataatcgaaacagtcaacggacctcaacccagcccagcccacacgccgcgaattctccgcgcaagctggatatccttctgcataatagtcacgcgcttcgcgtgtagcgcgcacagattcgtatcctcgaatagatggaccaggaacgcctccgcggcctcctggagagcttggatggcatgcgactgccagcgcaactcggcgccgacctcggcggggagcaggtcgagtgcgacttcgcgcactaagcgcgcaaagggcagtttggcgatgagcagatcgtaggagcgttggtagcggcggatttctttcaatgcgacggtgccgggcttgtagcggcggcggcggcctgtgggggttgggtctccggctgggaattgttagaatggggagattgggattgggttgcgcatgtggaggcgtgtaaggcgcttgttttggtgggagagttgaacgtacgttggacgttggcggggctcttgctgacttttgacttccctccttttgtcttgcgtgctttggttggtgttgcatcgtcgccggtggtgggctcggcggcgggcacggcggctgtcttgcgcgctttgtttttctgtgcgctgcccggtactgttttgcgggcttgcttgggcggcattgtgttatatgagaaatgcgctgtaggtatttttcgtagtggggtgttgaaagcgatcaattagaggttgatcgcctggcaaacagcgttctgccgcgtttatgtcgagattgccccttgcaggaactttgtccgagtatcgagaagacaaaggtttgcacttgcgcacgaggattttcgaagggattggatttaatcgtatctgccgacaattgaacagtctttgttcggaaatgctgggaaagctatagcaaccattcgggccttagcgccccagcccccgtgattctcacgtaaacacgcgtctcgtgtctggcacgtgacgataaactggcctacctggtcttatctccgtcatacgttgaataccccggaggcacttggagagctgtcagtgctcgtggtgatcacactcccgctcctttcgattcccgtccgcataagaagtcacaacaccacacgtcatggccgccctctgggagaacaatgggcaacccggccagtttcccctcgagcaatggttctatgagatgccacccgtcacccggtggtggacggtagccaccgtcgcaacctcagtcctggtgcagtgcaacatcgtgaccccattccagctattctacagcttccgctctgtctacgttaaatcgcagtactggcgactcgtcacgacattcctctatttcggacccctcaacctcgacttactattccacgtcttcttcttgcaacgctactcccgccttctggaagaaacctccggccgctccccggcgcactttgcatggctgatcttctacgccatgacgtcgctcctcatcatctcgcctttcctctcaatacccttcctcggcagcgcgctttcatccagcctggtttatatctgggcccggcgcaacccagatacccgtctcagtttgttaggcctgctggtattcaccgctccctacctgccctgggtgctgatgggattcagtgtgattgtgcataagatcgtgccgaaggatgagatcctcggcgttgtcgtcggtcatatctggtacttctttaacgatgtctacccgcctctgcatggtggccaccgcccgtttgacccgcctcgctggtggcggcgtctgtttgaacccgtgcctcccaacgagcgtgcgacgggtgcggctaacgtgaaccgcgagtttgtggctgcggcggcgccccaggttcgatgaagcgtattctttttattgatctagtgtcgctttctggaaggaatttgaggtttcttgtggcgttgaatgggaattgagctcgatctcttccacgaaagacatgtctcgctggtataagcagagccaagggtgcaatgggtccgattctagccttgatgtcgttcacgggtttaggcttttgatatcaagaccgtgggccgtaccagaggggaagctgcatacagcgagtttcttggttacatcagatgacagtatattatattgttcgagttttgcatgagacacttgctgaacgtggatattggcagcccctttaggctgtgtccaacagtggcacgatggagcagctgctctttatctgatgataccccttatctgatcatgtgagacgttgcccttggcccatgctcaatgtgatctatcaaaaaagcaaggagtaggacccgattccttttgtgtttgcaggtgcatttttttagataggaatagccacagatacccagattttttctttgcttaccgcttagagctgcatgcagaccttaagatgacgacatatcaaacagtgctagtacaagagacattcgacttcgctttgaccctcgatagacccttaaagttaaatgaagtaaaccacaccacgtgattgcatgcattgccgactactatcaaagctccttatagaaaacagccaagcatgatggcactatgccaagtctatacagcttcgatcctgcatgtgcatagtatcgacaggcctatttaaaacaatataggcagcgtagttaatataatgcagcctagtcttctatctggttactgtattattattagaaagagtgaagaacactacgtcagatccaattcaggcatcatcatagatcgtacagccccgcgcatttcaagtatagtcaagtcacaccgcaaaagtgccaacttgatattctgccggcaattatgctctccaccagtggaaagttgaaaagtacgagcggtataccgatctcggaaggcggtccatccagggccccataagtccagtacaaaccggtgctatggggccggctaagcaagagccacgtactccatgcctatcatagtaagtgtgtctaagtacgtgtacgccgtacatgctacacatattaccctggtcaatgcatgtctactccgtaccagatacctaaataatcatatgtagactacgaacacaattaatatcaatttatcccaaagagtaattcgccgttttttcgcgcccacatcccgcttatgataagcacggccggcgatctgcgaaatgcttgtacatagtactttacttttcaagtcccaggctccagcccaccgagtctcacatcggctaatcttagaacccaaaaaacggagaatcggccgatcttatcggagggcacatcggaggacacatactgagataggcacccgagttaaaagttagcgatacggatacaacgtggtgaaccgtaggttatccggtggattcgccctccggtcgtgttggcgtaccagagcttagcggggtccgggtggggggtctgtcaaggtcccatggaaacgcgtgataattcgttgttatttgtgcaactgataaatttagccgcggtttgattggcccggtgttctgatgtttcaccaggcatctgcatactgtatccattgcataccctatctatcgagtgctacattggaatatataacatacagagggaataccactccaaatgaggcccataatggaggggcaaggacacacttctaatcgcattgtgcacggccccggcgtgtggcaggtggcggttcacttggcaaatcggtgccaattcctacctcgagtgtggccacgcggtggccaagtcgtggccaaggcgtccgaggctggttctttgtttcatggattggattgattgaatcggccgcgtgagagatagcgtcataaataaatcgggatccaagggcctatgtgtgtacggagtattccccgccacatgggtgcatatgtggcggggagcgaaatacatacaattggagattatgatacatttgtattgctatgtacatacattattataccaagatcaatctggaatagtgccgttgtagtcaaactctgctccatcactgctaactgcataatgcctaggcagagaagtcgggactagagcacatgccaactaccactagcctcccgaggtcgagaaaggtacggtcgaggacatgcctaaataggactagtgcagtacacggtgctcacgttggcgtggggattttccccacggtaatttatttacggtacggtgacgagtcctcaaagttaattattttagcgacattcatggcgccaagggaagcaattgcagttatatataaacgacgtagttgtgtatactgtatatccaatatatcctacacatataattgagccaattcacatccgacggaaataatcaatccaactcaggaatacacagtactgtaagttgaaatatccataaataaattaaaaggttaatcaattccccttaattgccccatggccaacgcgccaatcacatcccctcccagccgctcaatcttggaaccacagccacccctctcgtgctcagcctcgtaatgttctcaacaccttttgtcccttccccgtattactttcccttcacctcccaatcctttttttcctttttcgcctccaatttcgatttttaaacgctgagggtctctcctttccctctttagcttttagtctccccactccccgtcactccttattatcgaactagcctcccctttctttaaatactcttttctccctcctttgtctattaccatcttatgacttgcatttcccgtactttgacctaactacggcctgaggggtatgtgaaacaaccttaatacgaccctaacgactacccttttggggcttcaattggctatcgcgcttctcctattcgatccttaaaccttcaccatgcggcgcggtctcgttatcttccttctcgtcaacctcatcatcctctccttgctcgtccggagtgtctcgaccctactggcactactagtcgaggatgccgcggccgacgccatccaccgcgcggagctgccctcgccaaattccagcctgatcgagcatcgcccccagatcattccaaagatcattcaccaaacatacaagaatgagaccatcccagaggtctgggtaggagctcagcagagttgcattgacttgcacccggactatgaatatattgtacgtgcatgccctttgatccgtcggatccaagctgaccctctgtcattagctctggacaaacgaaaagtcgcgagagttcattgccgccgaatacccctggttcttggacacattcgatggctacagttaccctattcaacgcgccgatactatccgatacttcattctcgcgcactacggtggaacatacattgacctggacgacgtaagtatacctacccggaagaccatggtattccattctaacatcaaacagggctgcaaccgtcgcttggatcctctcctggcttatcccgcctgggtacgccgtacggccccaaccggtatctccaatgatgccatgggctcagtaccccagcacccattcttcctccgtaccatcgaagagctgcaaaagtacgatcgtcactggctcctcccctacatcacggtcatgtactcaaccggaccgttgttcttgtcggtcatctggaaagagtacatgcgcgatgggccgagcgaagctgggcgcgtgcgcatcctcatgcaggatgagtacaacaaattctcttggagcttcttcacccaccaccggggtaacagctggcacggcaaggatgcgcatctgatcttctgggtaagtgacagtctgatattattatcgaacaatgctaatctctcacagatgggtgaacactgggtcttcctcactatctgcggcttcctccttgctggaatcgtcgggttctgcctctggtggagctacggacgtgtcatgctcctaggagccaagtaccgctaccgctactccaaagtatcaggcatcccaccgcgactctcgacgtcgccaacacgccgctcgcgactttcagtcccgaccctcctgcgacgggtcagcttcaaagaagacgaagagtccggcggggtcacagagacctcgtacgaactcgaacgtcgcgatgactagagatctagagattacttctcaactcgcaacttgccattttacagcctgtgtatttgtctgtaacgacacggccggatatgatctctgcatcagcatttattgtacaacttttgctctttctttctgtgtttaggagcgcgttatgcatggtgtctcaatcctgtgacgggatcctggattgaatgctcacctggagcacttgggtttgcttttggacatgtgcgagaccttgtctatcactcggttccatttcactgtcccccttttttttttctgtctattgatttgtaaacaacttggattcgcttctcgggagacagtggaatatatggacatgcctctatgccggattcggatatctccggaaaaatgatgactcgaaatactttggactattccaagtataaaatttaagtatagcactagaacagtccgtgcaatcatgtcttgaaacctcaacccgcaatcctgaaaccctaagttctccaatgacaacaccgtgccttgaatcgccacctctaagcttttcaggtgaacctatcacgtctgggcttggacatttttttaaaaatagtgtactatgtaacacgtccattgtttgagcatcccatttttggtgttttccttgatctaactaacatacttcagtccacatctcgcattctccgcgtctaccctacaatgtactccctccgcctcccctttgtatgtcccagctgcctcggacaatgcaagcccttctttcatgcctgacatgttcgaggacttataaagataatctgctgtgctgctctctacacagcaccaacatcatttctatatcatcctataacagccatccatctgactcttgactttgacattcaatccctacacgatatcgccgttcttctttactactataacctcaaaaatgcacctccaaaccctcctcctcactctaaccctaaccctcaccatccaaacaaccgcaacacccctcccaaccaccctcttcacccgcaaccgcaacaacgcagccctaaccgaatcccaactcgtcaccatcgccccctcctcgaaatcctgcaccgacgccccagcagcaggcgaatgcgccacggcaaaacaagccgcaaagttcacctcccagtccttcgacacgtacaaagtaacctcgaaagccgagcaagccgccgtaatcagcctgatggcgttcgaaagcggcgatttcaaatataataagaatcatttcccgggtgttgctgggcagggtagtgagttttatctgtctaaccttacatctaacataaatactaaccatatccttcagcacggaacatgcaatccccatccttcaacaagaaatacgccgcgtccctgcctgcactcaaagataaactcgctaccgttaacggtcccgctgagctccttgatctcttgcgcaacgacggtgcgacggacttcggctctggtgcttggttcttgaccacgcagtgctcgaaggaggtgcgggctgcgctggctgatggttctgagactgggtggcagcggtttatctctgattgtgtggggacttcggttacggatgagaggaaggagtattgggagagggctgttaaggctattggtgtttagattgtggttggtttgatttgtggctcggagctggttcttcgctgttgactgtgttgagtcttgactgtgcttatgatgattatggattatgggaataggaatggcatagaatataaatgaagttcttttcatggcacctctataatggtactaagtaacagtaacagtagaccaccttgtacggagtacatctatctcattcatctcattcattacacaattttaatatccaaactacaaaacacccttggtactaacaacatcacccgcaccaacatcacccgcaaccctacgcttacaggccgtgcgaatagcaacagcaagcgccttgaacgcactctccgcgcggtggtggtcattatcaccataagtgcaaccaacatgcagcgtcacgcccgctgcctgcgcaaagctctgcagaccatgcgtgatcatctccgtgctcaagtcgccgatcttctcgcgccggaagccaaggttgataaccgcccacggccgactggagaggtcaatgaccgcccacgagagcgcctcgtcgagaggcgcgtcgccgcggccgaatcgctcgagggattgtcgtgcgccgagtgctgctgtgaaggcttcgcctagtgcgaggaaggtgtcttctgttgtgtggtggtcgtcgactggggatttgttagcattgccattgtcattatcattccatattgtagtatagtatcctgtgtatgaactcactgtataaatcacccttcgcccgaactgcaagactcatcccgccgtgcttcgccagcgcgtgcagcatgtggtccaggaacccgatgcccgtgctgatggtgatctgctgcgtcggggtgaattgcgtcgcatggccggcgtccttgggtggcacgatgcctttcttggaggcctcggcttctttggggtctgttggggcggggaagtgggctgatggttcgtagggtgggaggacgccgccgtctagcgagagcgagatttggattttggtctcgttggtggaccgggagatggtcgctgtgcgcgccgggagcgacattgtgggtttagggatttggtgtagggcgaattggcaaattggagagagtcggtgtttggtagatgcccaggtgggagataatcggatttcttttttgtctgactcgttcgcgggagaatcgttgatccgcgcttcagtatggagggaatggacgacctgaggttggcaggtttatgacactggctggtccaggtttttattctgactttctggagatcgatgattctttatattgtcttcgggatttgaaacacatatcttcttcggcattgtctactttgctttactttgtttatcgtcgcactcggcctcgataagaccgactcccatctaaattcattccctctgggccgtacacttacaacggacataccagaatgccaccaccatctaaccacaggggcgatgtcgaacccccagaggaaatcacctgggtagccgcccaaggcttcctgaccggcgcgctccgcgtaagcaaccggacctccaattcgtctctccgtgaactcccagagcaatcactaataccctcaagtttggctccgtgtccatcttggctcatatgatccttatcctgccccaccccttcgtcttctccgcgccaagtccacccgtcgcatatgccccgacacaaccccgtccacgccctaacatattctcccgcgactacctccgctcacgactcttccaccgccccatagagggcttctcaagctggatatccccggggtcccgtgtctaccgtggtctgacgccgcagttcaaggtctttttgcaggtcgtggctatgacgctgggtggttgtatctggcaggagaaacgcgtgaccgagtatatcgagctgctgagacggattaaacgcacggagcgactggaggctgaacgtgcggaagggcatcgtcggtaatcttatatgttgtaaagatttggagacatccactaggttttgcaacgatgtagacttggtttggatggaacttggaacgtgaactttccaccggacacaatacatccgccgcttgggcggaactcggatgagctgaatctcatttctcggtcgttttccaaacctgcacggtctcacaggattgaggcgaatactttgtagccctcgtcagagttactcaccgtaggccgacggaggattgaacatgatcacgtggcgcggtcttggacaaccagacaaatgagcgtagggaacttgtgcattctatagaaaatctagattgctcttgaaagcctgtaaaagccacatgcgcaatgttgaaagtaagtcgaccttgctatcaccagtcagagcgtattgcatgacctcttcagagtcaggctatgtatcttgatttatcgcttctagctcgtcatcttcgctcggtctgtttctactgcgcattgctcttctaccgtagaacacccagcttagttggggttccgaacagattaggatgactctagccttcccagactcgtagcaggtgtagacccttgttagggcacaagccggacaaatagggaatcacccagccccagaaggctctgggcccgaaatccgggaataatcgaagccacccggttctacgcggatgaacatggtgaggatgaccagtacaaactacatcatgagcatcccgggtcgttcgggctgtcatatgtcgaataccaagctcaattattacggggtattgaatgattccacctagcaaggcagccaatgtactaatgtgaactatcaaccgtctaatagttatacgctgtatgactgggctgttgtagggccgaactatactagctttagaaagatgatgtccgtaggcttggcctccgatgctctagtacatctctagtacgaagagcacgtaagaggcgctgcactaggcttgatagtgccgatatagtcggaactacagggattgattgcattagactaattggactcctcgacatattgattggtctttgtactccagaacaaccctgaaagctacgtttgtacggagtatgaactataccccgtcctccggtcatcgttcatcgttcatccccctatacgatctacactcaattgacaacatagcatcataggttcaatctccggatccacccctaaaggaatgatcggcgactatggcactccacgatactgcttccgaaggggtattaatctctcgggcccacgtgaaagggagatcacaatggcaatcaggggggatatccccagacaccttggcgtcatcggtgacgaagttcattcagatcagcggttgtaaggttcactatcaggtcggatgccatgttgtttgggttgatgcctggattatgcctgatccagaccgctttcgacactgtatgtagatatcattggaattgaagctattcccactctaaaagtctctatattcacccattccctgccattgaatctatctgtctatttcaaaggtcctagggttaggtactttgcttgtatggtctctatcaagtaatccaggttctattttctgccggctcaacaggctggtccaggcatcgacacctcaaacctcaggcatccaagtttccccccttcgcacggccttctgacggtccttttcggcgccacctcagatttcaagatataaataagcgatctctgaaagtaaaagaagaagataaattaaaaaataaattaaaaaccctagagaagaaaaaaaagccacaactgaaacatctccagttgatacagttggacctgactgcatccgtccatcctcgattccctctatttcctcctttttccatcttttccgactatccctctagtggattctgctgttttcatttgacgcattcaatttggcctccttcttatgtgaagatatcaaatcacattagatcctgtgcatattgtggattccccccttccgcaaccatcaccgcattcaacattgttgacaggttcctgttgtctgcgcttagatatagggaacagtttcccatcttagcaattgtatgctaattgcttctcatggcgctgtgacgatctatagtatgtgctaccttccccctcatttgctccgctccctccctcctcgcgttattcccccgtcatgacccttcacacggctaattgatccctagtacgaacgacgttgaggtcgtcgagataagcttcctttctcagtacctagcactcgcgctactcttccaccttacgcaactccccctgcttctgtaccactagtccgccctaccgcaccagacatggctgaaatgatcggcaaacgacaacgaagaaagagcctgagcgtgttcagtccatccctcacactatccacccccctccgacctgcgatccacacccgaacaccctcggatgataccttgacccgggataagaaaggccggcggaattctagcttcttcggccggtctcatagtccgaacagagcgtccgatggatcgaataaccgccgccctgggacggcaggctccgacacccccgtcggcataccatccacaccggtcatggaaacccctcgtccgcggaggaagtcgatgcagaagaagcgcacctcggtttttggttctctgaggtcattgcactcatgggaagacgatgaaacgatgagtccgtccgtcggctcgatgatggacgagcaaagcatggccactccccgaaatgggatctggtcatctgcaatcctccaccacggggaagttcagacgactggaggcatgtggaggaagaagagtcattatttggtcctgacggatacccacctcattcgctttaagaatcaaggcaaagccgccgatgtctttgcttgtattcccgcttcttatacccgacctgcgccttcccatcgccaatcggtggcttcagtcagttctctgcaggatatgcaattcatggcctctggcgattcaactgccggaatcccactaaacagcataatcgcagtctacatgttggaagatgcacgattgtcaccatcggtcgaagtggcctatctcgacgagcgcacaaacaaagccacattggtgcaaatgcagacatctgatttgcaagaattaaacctttggatggtgggcatccgtcaagccgcgcagatggctagagcaaattgtccaatgccatttagcaagggatcgattgagtatgtaacccgtatgcttgagcacgagcgagattacgacccagaggtgttccgcatgttccgtgtcattcaaatcgcgtccagcaagtcaatcacccgctcttcctcggatgacctgacgaagctgtcgcccacgggctgctatctcgccattggcgcacataagctgcatctgctgcccatgcagaagaccaccaatcgatcatcggtcgtatctctgtcagactgggaggccggtacttcatttggtctgatgaacctgactggtttgtcgatggagtacggtgacgacagcctgcatctgatctttaggattcctctcaagaaatcattcaatgtctttttggcctctgttcattccgttgaaatcgcatgttggatccgacaacacactgaataccttcgcccattgtgggtacgacagccatacgaattcgtggttccgaaagaactgcaaaatgacgacaatttcccgcctgttgctttagatgaagattatggatgcttcgaccgaaccttggtcgcctactctgccagttatgacatcgacacatcaaatatacgatatacaatcgaccaggaatgcgaggatgctccatgcttccgtctgctgaagcctgcttccccgaaaaccccgcggtacaacgctttagaactcattgctgtcatgcgcgcacttcgctataatgaattcttccggtcaatctcgttccgcggggtcaatctggatgcattgcagggccttcgtgatattcatggggtggactccgacgtccatctcgaccgaggaggcgcctccgtgcatattccaggccagacaaatctaactgtcctctcgcaagaggtgcgagctttagctctgaagagcaaatggcttcgccgactcgacttctcttactgccttacacggatcccgacaccaactctggacaagggtactcgtgatccaggctgtgggattccagaagcgatcttccccgtctgtcgccgagaactgactagcgtggactgggttgtgcttaacggtatcaagctaggtgagtccgatttggactatcttgtcgatgcggcttcgcaaaggcgtagtcacctgcgcgctctagaagttggagactgtggattatccgtgcatgacctagatcttcttctgtcgactatcgtcgcacaagaatcgacacttgaggcgatcaacatatcaggcgtgcagggccgattgaatcccgatgtcctccagcaatacattggctattttggacaaatccgtaaaatcaacttatctcgcatatcacggacctctggcaccgaccctctcatcacggccgaaatgctgttcaactggcgactcgaagagctggctctcagtcggacggttttgaaccgcgagaccgtggatgccattgctacttacctggctagcgatcgctctcgaaaccttcgtgtgcttcgtcttgatcagtgtggtctgaccggagaggatgtggctatgtttatgcagtcgatgtctagtgaacctgattccccgcgcagtctccatctgcatgtcaatgagaaccgcattgacaacggctgttctcacgtgttcaatgctattgcgaacaatcagaccccctcgcatctgtcaatgcgtatgattgatttcaagaaagaagaccatttccgtgagctggtggattcacttcgaaagaacagcactctcaaatttttggatatttcaaaggcttccctcccatacgatgctagtcctgagacttgccgatcgttgcaagtgatgctggaggagaatgagactcttgaggctttggacattagcggtgataacgcgcaccttgatgttgcacgcttcggcattggtcttaatcttgcactgactggcctgaagaagaacacatctctaaaggtcctgagaattgaacaccagaaactcggtcttcaaggtgcaaatacccttgcctccgtcttagaggagaatgatacactacgtgaagtacattgtgagaacaatgatatcaatctgcagtcctttacggtcttggttaacggccttcggtgcaaccgctcccttctcactctctcctgcatggaccgggaccgagtcctgtccctggacaaagtacgccgagaggttgataatgtccgatgggaggccagcaacggcaaccaaagttccggccactcggtccgtcgttctctgtatgcagcgatgaccgttggccaaggggggcaaggacacagactgagcaaagcgccgccgcctagtgtcgcctcagcattggaaaactcaccattcgccaaccacaacgttgaactagtcttgcagtctctaaacgagagatgggacaccgaagtctctcggctcaatcgatatctcctccgtaactacaacattgcccatgggattgaggaaattgatgatgattccgccagcattggacgacctgcaacagcggcgagcctgagcacgatgtttgacaatttcaaattcgacgtgtccgtgtcggcagatgagattcgaacgccgtcgctgctagacgagcctcctgctgtcatccgactttcagaggcatccgacaccccatcccagtcctcgtcgtacatcgagtccacctccttccaaacaagacgcatttcatccaatacacgtcgccctcataccgccgctgctgcacacttcactccatccagtcatagttcttcggcctctctcctagctctcccggttccagccgtgcccccagcagttaagaaagcagagagcgtgcgcagtggacgcagttcttccagtactgcctcgttcagcgccggcagtacacgaagcgcatatggcgtcgcctcgtctaccctaagaggcttcctcagcggcaccgcgttgagggaacgtcgccgtgcggatgcagtgcgcccctcacctgtttgtgtcagcgacgacaagccgcctcagctagactggacacctccgaagcttgacttgggaggtctctagagccttccttacaccctcaccctcaccaacacaactacctgtacagaatcctccacacctcacccaacacgaaccgaaacgaagcctggctcggtatatatacgacgaaccacacccaggtttcgctgatatacccttccctgtgaaacatttttatcttattaactcataactcataaatcaacccaaccccatccgaattcccatttctccaaaccggccagttggcactgataccctggcgttgcatttttttttacaagaccgcattctccgggcgttccatattcatttcctcatttccattctcattctgtgccaacatcttcctattcatcttatcgtgtccttgacattttgttctttgttttattgctcttattggaaagcgtcctcattttgtgggttagtgacgctcatgcgtgaatccatggctaatgtttattgggtctggggcttgggctgtttgatattttattgtgttgttttctatgcggttgttcctctctagagcgaggattgaatactgtttggataggcatgaaacactattgttcctttctgtttgatttcctagtctcgaagactgagtagtttaagtgaattggaggctataaaacacaaccatttctatatatgcataaaattgataaacatcccacgaaaacgcgttcaatctatataaaaagcaacgccacggatgtatatctaagcccaatcgaaatacaatacaaatgggagaagattaaatctgatactatacaaaacggattcccatctcaccacctccaagtatcctctcccagatacctagtcgaacctcacatatcacaagaatctttataaacaagaagcccacgctcacgatccttctgatccatcttcttccgccaaacacgtcctttctcagtgatctttttcaaaatcgcgaagaaaccagcatcatgatcctgcacgttcttcttcaacgccacattgcgacgatgcttgatcgcagccagaatatggttgctctcttccacactgagctcgttgagctcgtagtcaatcgtccacctgtcggacgccgtgaaccacgtcggccgctgcaccggaacgccattcaccttgttgttcacgatgagcgtcatgcctagaatgtcctcgtcgaagtcgccgatgtgggggggggtgcgtctgggtacgctcttggttggtttcgggcgtttgggttcggcgggcagctcgaacaggggcttgtattctaatgcctcggcttcggcttcttcggctttggcgtcggattcttcctcgccggcctctttcgggaagagctcgtcggccagggattctactgggggagcgtcctgtagacttgattccgtcgagtccacctctgaataggtaggttcgggttcgagtgactcctctcctgggaacaggaagtccttttcgactgactcctcttctggatagaggggttcgtcttcgtcggcctccacggctgtctctgggatatggccgtcgatgtattggtctgggttgagaatgcggtcctggatggcgtcgatgtgggctttgttctttgtctgaatggcctcgatttgctcgtccgtgacgggctgcgcgacgatcaacatgtagggggggttaccctcgcgggcctcgaagtggaaacgcagggacttcttggggaacttcttcgtggccttgtccaggatcttctcccacaggccgagacttagttcgaattctttgtcgccaaggcaggtgttaggcgtgccgtgcaaagcctgatccatctcgtcgagagggatgtattggaagccgaagatgcgctcgatgttgtgatacgcgacaaagatgccgtccatgcggccaacgcgcacctgcagggaatacttgaggaaggcggcgcggatcatatcgaagtattcgcgttcgtaagactcccacttgccatagcggcgtcggatctcgtagcccatcccgcgctcgtgctccgtggattccatgcggattgaaactaccgcacgggttttcaagtcgaacatgccagtgcctggaagtctgggatcgtaggcgtcgagctgcgatcgcatgaggaatttgccgagggtgctgtagtggtaggactccggagtgtttgcttcttcctcggcagtgatcttgttcgcatcactgcggcggtagcgctcaaactgatcctttggcatcgtgagttgcttctccattgacttgcccagattcataagaatattagcgtggtcgtattccttgtccgcatcaatggcgtaaatatcctcctcttccttataacggaggaacatagcagtcggcgctcgaaggagacgggtgaacgtcctcagagggtcatcgaaaccccgactaattttgctagtatcgacaggccgccacgcggacagaagataatggaaatgagcgagaactgaagtcatgctcgatgacgagccgtagtacttcttcttatttttcttggtgatttcgcaagctgtctcatcttgtgaggaggtgatatatggcttcaaggcactgaagtcaaattccgtcacgggcatgatctggtccaggtaggggtcgaaattgaagactaaagaccgagggtcacgtagctggtagacaccaggactgtctgcttttagtatatcgatcattggtaggagacttagcaactcacttgaaaagcactcggtcgagaccaaaggcgacgcgtgggacaggaggcacggagacacgcacctcttgggtggaagattagctcacattcgacagctatatcagttccaaactcaccttttaggctctgctccgttgagtcaacagacccgcaatctttagacataacgtggtttttgatgaaatcaaggacttcgtcattgtccctgaattctggcctatccgaccacggggtgggtgctggaatatccaccttctgcctgggtgctggtttgtccgccttctgcgtgggtgttggctcattcgaacttgcaataccgttcttagagctggcgtccaatatttgggcaactacattgctagtggacttcaaatcgagcgtgctcttgctgggttcactgagcgctggcgtatctgctggtccgtctgtcgtaatcttagcattggctaagcgttttctctccttggccttggcccttctttcttgtcgtttggcatgtatatccgctgtccgcaaggccttgactttgtctgcttccaccagtgctgcttctatcgatactgcacccgacgtggcggcctctcgctgtgctgctctcgcccgcctcagttccaacttgtatgctgcccagaatgaaaggtctctcccggctataagtgactgctggaactctctgaaggccgggtaatgccgctgtttgtaattgctcttttgtgtggcagacatcccataccatattagagcagtgagctctctcggtttaggttgcaatggcgcgggtttttgaggtttggaagaggcggcatctttcgtgtcttggatctggccctatagcacactctgtcaaaactcatctcacgttgtacttcggatcgaaggacatacattgggcgctagcggcactgaaggttcggtcgacgcgtcaattgaatcggtcttcggctctatttcacctgaattggtacggagtgcagatatgcggtgaaactggcgcaaaccgagcgcgccagggcgcggcagacaagagagacagacatgtcgacttaaagggcctgacacagaccgcaaagaagtccgaagcattcaggtcaaatatcgacagttaatctgggaaagggtatagaaatgtagaagtccccaaatgttgtcgactcaagaattctagaataaaaaaaaaaactccgtcaataagccaccgggctaacctcagaattgcctctccggttttttttctgccaggagattgggggtcaccgctttgctgttatctcgttgccttggtgcctttctgcctttctgcctaaggtgtcaatattttatatcggggagaaatagaatagtgcgaacgatgagacgacagtaggaggtttggatgtaggttttgttttgttttttatatgcttcatattcaatcgggctataatatgattaaatgactacaaaatccatgtttcttagacttatattgtacaacatacaagagttatacattcgcaattgtatagaatcctgcactcttatcccttaacactaaatgaaagacatataaaatcagtcttgaactgtcaaatttgaactgtcaaatccagtaatccatcttctaattagaactatagaatattttatctcaccggccgagatcgctgggtagaattctggggtcggagaaacacccagccggagggcagaaaaaaagttgtgaaagtttaacatcttcgaacttcccattcccgcatacaaccttggaagttgcttctcaggtctctgtgaggtgagcaagtgtggattctcttatgatcaagtctttcccaactgtgtgccctgttccattgctcaatgactcggtttcccttgactgaggggcactaaataccccgcggagttcctatactaattgctaacaccaccacagtcgagacgcttctccaaccatggcctccgaacaattgcgcatccttattgtcggcaatggtggccgtgagcatgcctacgcctggaagctgagcgagtcccccttggtcgacattgtctatgtcgctcccggaaacggtggcacaggcctgggtaccaacagcaagatcaccaatgccaatgtcaagggcgacgactaccccggcctcgtggctttcgcacagaagaaccaggtgaacctcgtggtaccaggtcccgaggcacctctcgttgatggcatccagggttatttccaggctggtgagtcacctttttcttttttttttttttttcttttttttcggttgtttttttcctgcataccaatcgctttgaacaattctaaaaatgcctcacaaaaatagtcggtattcgatgcttcggtccctccaaggctgctgcccgcatggagggctccaagaccttctccaaggacttcatgcagcgccatcagatccccaccgccgagttcggaaacttctctgactacgagtctgcacgtcgctacctcgactccgtgtcgcacaacgtggtgatcaaggctgatggtctggctggtggtaagggtgtgatcatccccactaccaaagaggaagcccacaaggccttgaaggaaatgatgttggaccaccagttcggcaaggctggcgatgaggtcgtgattgaggagtacttggagggtgatgagctgagtatcctcactttcagtgacggttatactattcgctcgcttcctccagcgcaggaccacaagcgcatcttcgatggtgaccatggccccaacactggtggcatgggctgctatgcgcccacgcgcattgcgccgaaagaagttgtggatgagattgaccggaccatcattcagccttccgttgacggaatgcgaaaggatggtacgtttgatcgaaaatgcctttcccaaagcatgttcctaatcattgtctaggtttccccttcgttggtatattgtttaccggtcttatgatgaccaagaacggacccaaggtccttgaatacaacgtccgcggtggagacccagagacccaaactctgctacctctactcagcaaggacaccgatcttgcacagatcatggtggcctgtgccgaccactggctggacggtgtctcgatcaagatcgagcccaacttctccaccaccgttattgctgtcgccggcggctaccccaacgcttatgccaagggcaagaccatcactctggcccccgcacccgctggaaccctcatcttccacgccggcacaactctttctggcaacgagttgcaaacctctgggggccgtgtcatcgcctccacggccaccgccgcgacccttgaggaggctgttgctaagagttatgcaggcatcaagaccatcagctttgaggacatgttctaccgcaaggacattgcccaccgcgcgttccgccagaccgctaacacctcgctcacctacgcccaggccggtgtctctatcgatgccggcaacgagctcgtcaaccagatcaagagctccgtccgccgcaccaaacgccctggcactgacgccgtcatcggcggcttcggcggcctcttctctctacccgctgccaactccgcctaccaccctcactcgcccaccctaatcggagccattgacggagtcggcaccaagctcaagatcgcccacgcaattggtatccacgacaccgtcggcatcgacctcgtcgccatgaacgtcaacgaccttgtcgtccaaggtgccgagcccctcttcttcctggactgctactcctgcggtcaccttgacgtgcccaccgctgcggccttcgtcaccggtgttgccgagggctgtgtccaagccggctgcgccctgatcggcggcgagaccgctgagatgcccggcctcttcgtcgacgactcctacgacgccgtcggagccgccgtcggcgctatcaacaccacgggcgacaacgctcgtgccatcctcccgcacacagaaaacatgcgctctggcgatgtccttctcgccctcggctcgtccggcccccactccaacggctactctctcgtccggaagatcgtcgagcgtgccggcctgagctacaccgacaccgcacctttctccatgcccggcctcgacgccggcgtctccgtcggccgtgccctcctcacccctacccgcatctacgtcaaatccatcctcggcgcactcaacacccacggctctgccattaagggtctggcccacattaccggcggtggtctcaccgagaacattccccgtatgctccccgacaccctcactgcgcaggtcgacgtcagcacctgggcccagccttccgtcttcacttggctccagcgtgccggtaacgtctcctctgccgagatggctcgtgccttcaactgcggtgttggtatgatcattgccgtcgaccccgcccacgaggctgctatccgtcagaccttcgaggctgctggtgagtctgtgtaccgcgttggtgagctgcgtgctcgtgccaagggcgaagagggctgtgtgctgtctggacttgagtcttggtctgcgtaatattcacgatcctgacgttaaaatttgatattgatggtgatgttgatgcgtgatgctttttatatatggatggagaaaatgatttgcctgggttatctacatatcttatagatttttttgttactgtttatttttctggttcttcgtattccccgtctttcttctctgccttttataatataggacttttggatgagtcccgaactaatggattttcctacgtgcatgagagtatatatattggaaaaaaagtcattgatctatatatccaagatttctgtattgttcctattcccagcatatctgattgaatgcctgaaaatatatatatcggcgataaaggtctgatgtaaaaaggctaaaacaacgatgctcgaaagtcagtaatgcataatagacaccacgattcaacaagcgctaaatctctcaatagcatttatagaatacaaaaaaccagtggatggaatattcgaagtcagagttatgttaaaactacggacaaaatcgggcaatttagctgaagacaggctagaacaagacggacgatggagacgtcaagagaaaaggaaaacccaacctattccccatagccaaccaactccatatgcatcctcaccctacaggtacactgttgtcgccccagcgccagaaactcgtccagtcaaacaatcagagaggcggacgggacagcgcattcgaatgaagaaaagaaatggagggtaatggtaaaatgtttcaaagcagagatggatggataggaagatcgaggtaaagagtaaggtaaagagtaacaaaaaaaaacgatcgactctattccactaaaatcgagattccattttcaggctatccgcttgataatgcgagtccaacaacgcttgcaatccaccagtgcctccatcctgctttttgatacaccaggaaagtacgagtgaatacgagtagaaaagtgcaacaagaagcttagaagcacttgcggtggacgatggaaggaccgctctcgtcgtactcctgcttcgagatccacatctgctggaaggtcgacagggaggccaggatggatccaccgatccagacggagtacttgcgctcggggggagcaatgatcttgaccttcatggaagaaggagcaagagcagtgatctccttctgcatacggtcggagataccggggtacatggtggtaccaccagactaaaagtgtgttagtgggatgttgcaagttcaaccggggagaccttttcttaccatgacaatgttaccgtacagatccttacggacatcaacatcacacttcatgatagagttgaaggtggtgacgtggataccgccagactcaagaccaagaacgtttggctggaacagagcctcgggagcgcggaagcgctcgttaccgatagtgataacctgtccatcaggaagctcgtaggacttctcgaggctggagctctgggaagcggtctggatctcctgctcgaagtcgagagcaacgtagcaaagcttctccttgatgtcacggacgatttcgcgctcggcagtggtggagaaagtgtaaccacgctcagcgaggatcttcatcaggtagtcggtcaaatcacggccagccatgtcgacacgcgagatagcgtggggcagagagaaaccctcgtagatggggacgacgtgggtaacaccgtcaccggagtcgagaacgataccagtggtacgaccggaggcgtacagggacagaacggcctggatggagacgtagaaggcgggtgcgttgaaggtctcgaacacgatctgggtcatcttctcacggttggacttggggttgataggagcttcggtcaagagaatggggtgctcttcgggggcaacgcggagctcgttgtagaaggtgtggtgccagatcttctccatatcgtcccagttggtgacaacaccgtgctcaatggggtaacggagtgtgaggataccacgcttggactgtgcctcatcaccaacgtaggagtccttctgacccataccaatcatgatactgcgcccatgttagtatatttttattcattgagaatcaaactggctgcatggcgtatgtgtccaaaagccaaaaagaaagggggggattatttacccatggtgacggggacgaccgacaatggaggctgttgaatttggtcagttatttgatcctcacattcaaggtttccagccaagcaaaagaggggaagccatccgacgcaagggttggtgggatggcggccttcgcaaaggaggggtgtcagattctgtggggttggacttacggaagacagctcgtggtgcgtcgtcaccggcgaaaccggccttgcacatacccgaactacatcgcaaatcatcagtatcataattcttgtagttttggaagcgccatctcgtaattgtggagggagatggaaagcgattgggatggattccatctgccgtcatgtgggcgaattaggggtggcaacgaccgcgaccgggctgatttggtgaccaggccgaaacacaagccagaagctcccgggaaaaagcatagcacatacccattgtcgataacgagagcagcaacttcttctataatgagatatccgggttagtggtcattcgcaaatgggattcgagctgtggcaacagggggcagcttcctgggaagctgctgatgtggccacatcagaataacataccctccattgtgacagattaaacaatgaacctaagggagagggggggatagaaaaagaaaagaaagatggaatgaggttagaggggggatatagttgggattaggggagaagggaagaaggaagagagtgagggagcgagaagagtggagaggggtttgtgatggctgggattgtgcgctgcctgaggccgtcgattctcttttgaccccctccgatctacaggttttggccgtttcttttatatttctgatatctacaagttcaggataaggcagaactattttcatctcattattgcactgtctcggacccctttcttgtctacctagagcattgcgtggacactcttaggggtgagcctccagacccctccggggaacacgtaccttgaccgggttaggcactctagagtgtttagttgtattacagttattacaatatcagacatgcgacaggcatatgattgtatatcgtactccgtacatacatgtaggctacgggattccctgtggcgtggatgttctaagtataggacagacccagacttcagtcattggggtactcccgttccaaggttatttcaagtggacacacacgcatatacggctgtataggggataaccccttagaccgtgagactctgacactgccagataatttacgtcctcaggttgttaccgctacttcaccccaggcctaaggtgacaactaagcctgttgtaatagtgagcggtgaggtggtgccacgtgacatcttgggaagtacgagatgtacaccttcttttctccctgactacccctgactttgtctccttatttgcggagtaggtatctcctgatttatacatcaaagtactattttggaaaaccagcctatgctgaccatctccatggcagaaaacttggcatttgacccctccatcggcaataaagtcgctgaactttaagccccttggaatatatcttggcagcagaccaggctttgataaccgggttctagtacattccgaggcacgttgataaaccggaaaaaccatggccgagtagttctattgacatgcagccaatccgcagcacaagtgtttgattattcatctactctcactgcttactttcattgctctcccctcattgctcgaggaatatcgtttccgaaagcctgaagttcgctgtatcggaacaacgaactctacaagtgctctagtcggtctctatatatcgagtccgaaatggctaagctcaacggttcaagagaactactagtacgtagtaagaatgagccattagaaatcacattcatgccattcaaaccgccgaaacaagacttggtgataactcttttggctttcccaaggtcgttttagattttcctattcggtagccaagaagaaagaagacatcagtctctgcttcggctttctagtgacaactccgtgttgtgtgtagtcatgatgtagtctagttgggatgcgatcacatgatcgaacccgctggtcgtcgcgcgaatcacccagagccgtggccgagacgtcagattatgtcagcgggtcttttttctaactgtagaaaagagtattgatagaagaccgcggacaatactgtgcgataaacagcaattcaatttctgacttgcgtcatagactctattcatactctccttctttcctccctccccaaaccaatactacctaatcaccaacaaccaattaccccgccagcccaccatggaccccgaaatgaacaagctcctcaaatggagtgttgccaacacacagccagctgcaggcgccgatgacgagagcagcagtgcccaaagtcgcccagcagctgcgtcaaacctgaccccacaaatggtgaacacactattcggcggtccctccgaggccgacctgatgcgggccgcaatggaggtcgtacacgacgacgagtccgacctggagaacaagttgatcgcattcgacaacttcgagcagctgattgagggaattgacaatgccaacaacctcatcccgctcaatttatggaagccgcttgtcgagcttctccagcacgacgagactgaactcagacgtatggcggcctggtgtgtgggaacagccgtgcagaacaaccccaaggcgcaggatcatgtatgaaaactcccgattgacctacaagcatgttgaccaaatactgacacatccacagttcgtcgagctgaaccaaatgcctactctcgtcaatctcgccacgacagactcagaccccgcaacccgcaaaaaggccgtttacgctatctcctctgcggtccgtaaccaccagcctgccttggatgctctgcacaagagccttccagaaggctatcccaccgataagcgcgatgccgccgatatggaaggcattgatacgatcatcgatcagctgcggtctcacccgaccgaagcctccgcatgaatggagcgagttgtgactggactgaaagagtgaatacacaaaaatacagaggcagcagggtacccactgaatgcgagtccgttcttggaactggccttgtatcgtgccaagggctggggctcgcaatgcaacaggcaacatattatgttgctactgcaactgcgttgaatgctatgatgatgacgacgctaggcttcactgctggtaaatgcctgcgattatttgatttgcggatatccgaaatggttctgcaatggtttcttgttgcctaagagttgcatcaacatgaaacaacaacctgattttttgtggttcaagcatagatttgaattgtacataccccggggcttttgtcctacattgaatgcaatcacgagttccgacgatcaagaatgtcaaatcccgatgtttgaatctgtacctatgctgcctaaactggaccgtttcgttgtagcagtatgccctaaagaaccaaattcacactgtattgtagctcattaatgaaatatctcaagaaaagcagaaatgaattcatactccgaacaaattagagctcacgttgccttgactgatgatatccatagatatctcggaacaacatttctccaccagacatcgtcattggacttcagctctcaccagcaacatccccaaccaagacccccatcccccacaatcccaaaatggacagctcaagcaaccgactcttccgcttctccaagccagagtggctgaacaactccgccgtccgcaatggcggcgtctacgtggcaggcgcgctggtaagcatccgatccacctccggcctcacttgctcgtcgcagacaccccaagcccaaagccctcaactccaaatcaaaataaaacagaattgaacataacatctacctcaaacaaaaaaccaaaaacccaaagagctagaagctaacaaaaccacagttcgcagcaggcttcttcttcctaatcgacgtcgcggcattctcgcgcagcccgcgcaacggctcagacgtgcatatcaaattcgtcgactggatccccggtatctgctccgtgctgggaatgctggttatcaactcgattgagaagagccggctgcaggctgatagctttagttacagcgggagtggggttgcgtggaaggcgagatttgtgctgtttttgggattcgcgttgcttgctgggggattggctgggagtgtggtatgtatatctctttccccctcctactatactacgctttactgactcgcttgttcgtagacggttatggtcctcaagtacctcatcaaggattatccgatccagacgctctactttggaatcgcgaatattgtggctaatggccttgttatgctcaggtatgtgtcttgtctgatttgttattcgagttgtgcatgcgtgctaacaatgctattctcgatctagctctatcgtcctctgggtctctcagaacattgaagatgactacacctacaatctggcactgtgaggaggactgtttctatctataactggtctttgtgtattctactcgatttttgctctgatgactttttgctgggatgcattatgctttcacgtcttttggctgggattggcgctttagcatgaattcattcacattcctcaatgttttgcgtgttctcaagttaggagtccttattatgacagcctctgaaatatctagaataccatggtattctataagtaaacagtaaagtaaacattatcgagagaaaagtatcatttcagctatgcatcaagaaaccaaggcctaaaagaagcccccttgaacaccagatatgcattcataaaatcgtaaaaatcaccattacctcggaccctcaatgctcctcgcagaacaacctcagtaactcatcaatgcaagtcatagccttctccttcttcaagactgaaggcgccactcccggtgcctgcttcaagtacctgcggagcgcaaaagcagcagctttgtacgtcgcatggtacataaccttgaactcatcatcatccgaagtgatccccggtgccggggtttcagcccgcaaagcctccggcgccggcgtcgtgcccgagacatcaagttcaggctccgcacccgcaccacctggcggcttacccgacgcagagcgcatatccgcacggtggaatccatacagccgcatacaagtcaagacggtgcgcgtgatgagagtcttattatccgcaatcacagcatccggatccttagccggcgagcctggcgtggacgccggtttctcctcggagaccgaaagagatgacgggccctggccctgcgacatctgttctccacgtcgcgggccagaatccaagcacgggttcggagtaggcgcgcgcttttgtggatcggcattcagggctggcgttgtgcggccgcgtacgctacctgggcgatgtagacctgctccgatagagacggatctggaccggtgggagacgatccggtcgagagacgggagggtgggtccgtcttcttcgggctcgcgcttgatgcggagtgtttgtaggttctgggatgaggaaagaggtcgtgaaggtgccattagttgtgagacggcttcgccgcctcgctggcggacgcggcggtggtgctgtgcgactacttcgaagagcgttgctactcttttgcgtttggggctgggagagcttatgtctggtaggaactctgcgcagcgcgggttggcgatgggttggtccgggttggagggtggtggggatgggtaggcttgggcttgcgtgagtcgtgatgttgatagtggcacggcgtagattctgagttcatatggagcacgatgtggtctatttctgtgatctgggatctcggagggggatgaatgtggcggggtaggcgggcgtgtgcatgatgctgcgctggatagaacgccgtagactaataggcttgttgtggttgcgttgcctgatttggtgttgccttcgacgctgaccagcagacccactgggcattggaatgattgttggagtgctggatcttcttcgttcagccatagggcgcctgttagcttcctctggagccatcttgatgtccccgcgtgggatgtgtgtagttcgaggttaggaccggcgcgtgcatgcagtgggatgagtgctgggttcacgaagctacggagattgagctgggactccttggatagctcggactgtgagtaggaatttggatcgaccagtcgaatccctggtcaagtggttagcgaggaacaggatgcgatacgcgtatggcttaccttctaacttggagtccgagccgagaggaatggatcctgtccagacattcatcttgttaactggatcccgaaaaggcctttcatgggttcagcatagtgacatcaatctggtatagttgtgtcgtttctaaattgatctgctgttatctccgaatctctgcagacgcgccgagtccgcgcgcggtcacgtgtacaattaatagaccgaatatatcagtaaggtaaaaaggaagcagtaaaactaagtagatttggattcctcgtttttcagaagaattctctatatccattgcgttatagtacacctagagtagcacagccaggtgctggggccattgccatttaaagtgaggcacaccccacaccaaatcactcatacatagcatatcaagcatatcaagcgtacgctgaaatcaaagaaacagcagaaaatcagatgtcatcgtgaaggccggataccgtgagggccactgggatacagtagaagtatagcccttgaccccgcgcctcatccattctggacgatcagaactcctcctgttcctggaagaacatcgagaagctaataatggtgccatagatcaacaagcctccgaaaatcgacatgatcattgctgggatctcgattgcgccgctgtgggcgaggacgacaggaagtgctagacaggtcagttgataatcatcaatggcacaatgatgaggcattaaaatggacatagtgcggcctgaacatcaagaaccgaccggtcgagtgatgatatgtcccacaagaggggttgttgttaaccaacgacgtaccgataccagtaagaaccaagaatccggtcatgaaccgtccaaagtccatcgcagagttgctcgaactgtccataaaatcatctgggtttgcgcatcgttggcagatccagttgggaagcggcgcaacaacgtaaatgccgaccaccagcagcggccagtacctgtgccatagcgcggaagagaggataacgaggaggaaaccaattgcgagaacctggtcaaaagttagagaatattcagatgctaggcgaacagcgaaacgaagcatacaaaggacagggcgatgatggtcttgagtccagcggccatgattgcggagacgccgaaagccgatcgatgagattaaagatgggagacgcaggagccgttgaattaggtggatccaggagacgatattaagagcaggtcaacaatggcagccccattggctgagtgcgggaaatcaaagaaggacagtcgtgcgacaagctggagatgagctcgagaatgagtgacgttggcgcctgaaggtcactggatgttagcgcctgaggcaccaacagctcatgcttcacaccgcgtcactttactgcctgctccagctcccccatcctcctccatcaccggattatccctcggattcttacgtcgctgttcctgaatctctatttatcaacaataatccactttctctgtttgctttgatatccattcaacccttcccgccacgatgttcagaaacaattacgacaacgatgccgtcaccttgtaagaccaggtgctccctcggattcatcagatgctgactcaaaggatcctagctctccacagggtcggatatttcaagtggaatatgcacaggaagcagtgaagcaaggatccgtcgtcgtggggttggtgaataagacacatgccgtgctggttggactcaaggttcgcatacctacagcagagaacgaacagaccaaaccgtcaaaactaacatttggcatctagcgcaacgcagaagagctctcctcgtaccagaagaagatcatcgagatcgactcgcacatggcgatcgccatcgccggcctcgcatcagacgctcgcgtcctctcaaacttcatgaagcagcagtccctgggctcgaagatgacctacggtcggcccattcccttggaccgaatcgtcgcccagatcggcgaccgcgcgcagaccaacacccaacactacgggaaacgtccgtatggtgtgggtttgttggtggccggtgttgacgaggccggcccgcacttgttcgagttccagccctctgggctgacacacgagatgcttgcttgtgccatcggtgcccgttcgcagatggcacgtacgtatttggagcgtaatctcgacaagttcgaggactgcagtcgtgacgagctgatccaacatgggttgagcgcgctaaaggagacactgtctcaggataaggagcttacagtggacaatacttctgttggtgttgtcggtgtgactaatggcaagaaggagagcttcaagctgtacgagggccaggacacggctgtgctactggaggtgctggagcagcgtgagtccgctggtgcggagggcgagtccatggaggttgattcataaatgtctggtttgatttaatgattcgcatagacacgaaattttgataatgctttgtcttgtgtttgcgtccaatgatctcagttatccaatcatcaattcataaggctcttctcaacgaagtaatctatttgtatgcctgaagtctttcactgccgaaacccgaacaaatgcgaaacaaacccaaacaaacaaaacgacatctatatactggtaccccattgcttgatgatcaaacagagcagcttcattcctctccccagttcaactgcatccgccctgtgctgacccgataagccagcaacttcggccagacctcagagacctccttggcctccgcaaggatctctccattactagcactgatatacccctcttggacggcattgcgcacccaagccaacaagccatcccagtagccattgatattcaacaacacaaccgcaaccttatgaatgcccagttgattccacgtcgtcatctccataacctcctcaatagtgccaaacccaccagccagcgaaacaaacccagacccaggcccgccctcaaggaccttcgtggccatcagacgcttgcgcgtatgcatgtcggcgacaatggtcgtaatgccgtactcggactcggggattccaccggtatgaacagcatcagagtcgaccacccgctcggcagctttgccggcttgcttggcagtggactgggtttccatgtgctggcgcatgccgccgactgttgcgacttcgactagtgcacgtgggatgatgccgtgcacggatttcgggcccgagagcgagactagcgtgcgcgcaacttcgcccattaggcctgttgtgccgccgccgtagactagttgcacgttgttcttgtggaattcttcggcgagcgctcgcgctgcttccatgtgtactgggctgttgcctggtacggagccgcagctggaaacccgaggggggtttgttagtgtatagttcaagacatgaggtacacacgccagactggtagacgatacggtgtggttgtggcattgaaagtggtggtgaggggcacgactcacaatacacagacgacagcgggtttggtctccgagtccgccatgttggtatggtaattaggggctgagtgtatgaacaatgaagaggtcttggaagggcgttaattagagaagaaggaagagaacagcaagaggcaagaggcaacctgggaccaaacaggtaatcccccactccgataagagataacgtagtacacataacatagtataacgtcagggctccgactttgttcttcaaaggaccttttgatgtaagatttccaaataaatgcctctatatatgttatatattgcagctcgattttgtgttgtatgtttgcgagagtccagccactagttagtacaacttgaattaactgactagggcttgtgtacggctaaacaacacaacagctgggctttttatatcaacactaaacattcagtatgatacttataacaattttttggctatctaggttgtagggacatgaggctgtgatcggaataagctatatagtcacagatttatacttcttggtacctcaaaagccaactttatttaggtacactcgatagcttcaatattatgtcctcttctagttattgctattagtcaacttcatagtactataactaggtcaaaagaagtcgaattaatactctttgtttattctcttaatgctttttgagtccatgcagcaacttgagagtttgttccaccgatggagtataaattcacctaaaaggggattgttaagatcacaagagaaaattgattccattgttttccgttgccatggcttgaataaaggttgttcagtcctagagacttgttaaattgccatttttgtttcttatgttgagtatcatacatggaagcctatagaacaatttgctcttatagacaacttgattgttgcctgggtctatatataaccagtcacttgcccttgcaatacaggatgctcctcttcttttattgattgtcttatagtatactggctatttatatgtctatgcttatatatatgtctgtgttgaaatacgatttcatcaattctgtcaactctctccatcatccagggaaagcctcagttatatgaggtacctggaacaagttttcctagtgggaatatcggagtttccaccgtttctctcattcaagataaaggggcgacatggcgatacaaagtttgacggaccgatactgagtccctcacctggtttcacctttcaccacgacggcaaatgctgtggctccttctgtctgtcatactttaggagctgtctatttccacactgtgctgactgtgagccaatgattcggacatggaattcgtaggaagaaagaagctatcttccttgcttcctcatgctcaatcatcagcactgacttcaagacggtgtactcgtggaaggcatttatctttgccatcttcacactgctgccgtgggatatgttgatgtcgtcggacggcccttcgtgcttctggtgctcgcgtggcgcttgtgcgtgccgtcgagcaggatgtgaagtgtctttcccgttctgtcaaccaggcgaaaaaggctgccgcacttgcgctagagccgtctgcgacttctgaggcggaaaataccgcagcacccgcattgaaagagtctgtgacttccgaggaggagaagttttttgatgctcccacgcatgccgaagtttcttccacttctgtctcagacttacagaaatgcagctatgcttcacagacgcgcagtatacgcacttcttgatgatatcaaatcgggctttatcacaacgcagtgcccacaaggacagtgataaacagagcagactcattattcaagaccttggtacaccaagtatcaatttcgacactccattttcatctttggatatgcctggctctcccttctatcctttacatctttagctatgcgactactaggccacagagaaggcaccgaaaaagagaaagatgagctacagcagctaaatgattcgagagacaatgaattaaagctcagcgatcaggcaaagatatgtatgccaaactcggctgatagcccctagataccagtccctgtaaatgctatgcccagcacccaaacgcctagagatgcaaaaaaagggtatcaagtaaacaactcagctgacgatccgggccttcttcctcttccccttatcacttgtagagctaggcggcgaattgctcttatcggaagccttaccaggcgtctcgacgcggacctgtggcgtcgacgctctgacaggcagggtagaaggcgtactagtcggagccaaattagcagcggtcttcggcgcacccttaacagccgaggcggtagcctcgccgccagtccgtgataggatgaacgatcctggttcgccgacgagggggctctcgtccatgaattcgtcgccgtagcgcgtgagcaggctgaatgattcggctagactgcgcgtatcttgatatttggagcctgtagatgagccacccaggcctgatttactggttgattgggaggattcggtggctgggaaggatacgtctggcatgggtgttgcttctttgctctggggggcttggctggttccggcgggctctttgctgcggactcccggtggcaagtaggtgtgtccatgggaggcagtgaatgttggcaatgtcgcagcggatttcatgagctgggttagggatgtgacggctgatagctgcggggaaggattcattagaatacttgtctcggagcggttcgtgagttccgaggcaatacatacaattcgattccccacaacactcgcaaccgaaggggccatgtagatgcagtcgccgacaatgaagtatgtagctatcacggtcacctcgtcgtccatgccgctcctcttccgccggttctgcttgcgaatcacccagatgttggatggctcgtgggcgaagcgtgtgtctgtctgtgcggctgcttggagggggtcatatgacacgataaactccagaccctgcattgttttcagtcgggcttcgaacgcttcgcgcgtctcgacgaaatgacggaaggcatcgttgtagttggcttggatggcgagcgaggcgttgttggaggtcgcatcaaagaaaggggattcggcaaagtaaaatagaactaattgacgagaagattaatctcaagtccaggtgtggtaaggtgtacaacccactgttgttggaatgaaggaatcctcccatcatctggacgtgcgggggagaccgccagaggatctcctccattgaggcatcttggttcgccatttgcgactccggaatgatagaccggagtcaactcggtctatcaaagctcgcgacaagctttatttttgaaaatgacgcaggaggtgcaggaggtttaaggaaaagacgcagctcggaagttgaggctgcggagaaaattatgtttgctttgtttgcatgttgacagtatatgatggcgacgggggagaaagagctgaatatacgtacttctaatttctacagttaaatggactatatacacatatacaggtactgatacaataaccaaaggcaaccaaaacgccaacgccaacgctgaatgttgaatcaaatcactatcccatcgcatggatccggttgttgaaagcagggaaaagcatggatcataatgcgatcaagcataagtcaagatgaccaataaacaaagctgcgccgaatagttaagaagtcgtagctgatctctcgtccgcatcaagcggcgtgaagacgttgcaaactacacgcagtttggtcaacatctcatcccattcgccctccgctgtgctgagtgcggtaatggcacccccggcgccgattcgccatgtctgctgcttattctcggtgtaatctcgaccaccagaacaagtgaatgccgagcgaatcagaaccgagaagcttccacctccgccaaggtccaggaaacccatcacaccggagtaaatgccacgcttgcgattctcaatcgtgcaaagatgcatgcaagagcgttccttaggcgcaccagtcatagatcccggtgggaggcaccgctggagggtggtcaggccgtggacggacatgttgggggtattcaggtgagaaatatgtcgcacagcgaaaccaggatgattgggccggatcttgccctttatgtgtgtgatcattgagtagactcggccgtaatctgcgacttcgagcagcttctcaacatgaacgccacctgatccgcagatgccgtacagatcgtgccggatcaaatccgcgatcatcagattctcagccatctctttcgtggagccgaggatctcacaggccttctccatggtcatatctggtgattttcggactgtgcctttcattggcttcatctccagtgtcgattcacggtcccaattgaggaaacactcaggactgctgctggcgatctttgtatctcctagatctgcgaaagcgctgaatgcagcgggattgtatgttttgagtcgtctgtacagcttccaggggaacatcaaacgatccgactctaattctggaactggcaatgtgattttcgtctcagaggttaggcataattcataagattcaccagcttccagctccgctttgcatgactcaatttgtcgtttgtactccttttcctcggggagctgaattttgctctcccggagaattgagtccaagccccgatccgcagatgtatcattgccactgtccgaaaagttttgcagctgctgcagtgtctcatcaagccaacccgcatcatcatcgcgagtggattgaataacaacagtgccagtagtattgtcaaccacgacacttctttcacaccacagaaggctgacatcgggtggatccgcaaaggaaggatcagatttcccggtgctggagtgcttaggtgacttagaagcctgcgcatggcccgtgtgaggaagacaagtgagaccaagttcgtaggagagataacccaggaagccaccccagaatggcacctgagaatttcctgaatcaactttcttcatttccatcaaataccgtaaggcatcccacaattgagcgactgtaagataactctcaacctctttacagtcgccatacagctggagcattcgaatcttatctgtctcaacattgtattcaaaccgccatgagccaggactcggcaccgatgcgatactgtattggccattggattggaaaaggactgctggtgaacctggtttgttgaacacttcacttatagcctcggcggtcaaactaggccggtcgagggaccggaaagacgaaattttcgaagttgacttgctccagttgaacatatcataagcaataccagggaatgcactaggggctgtgtgggggctgatgactgtgctgggaagggaacaatatcccccgcgtccaacgagcttgttgtatccaagagccatcttccaccaattccggagcagtgccttgcaggcattgatttctgatttgcaggattccgggtggaattgaacaccccagaatggcttctcaagatggcgaaccgccatgggtatctgtgtttccggacgatcctttagagccagccaagccaaatattccaaatcggtcgatgttgaagcagccgagttggcacaaagtgagtgataaagcgtcacctctacttccggtagatcctcaaaaatatccttagccgacgtggaaatcttgtggatttggccatgaatcgggtacgggagtcgttcgatgggaacgccatgatgaaggcaaaggctttgaaagcccagacagataccgagaactggaaggagctctgagtcatgaaggtcccaaatatctttcatgataccgacatcactaggcacgttgggatctcctggtcctggaccaagaacgacagcttcgtagtgctggagaaactctttcatattggaattgggccattctgaatcgatagtcattattgtgactttgacccccagggtctcctccagcatggcgacaacattgtaggagaatgagtcataggcatcgacataaaggatgctcttagtcgaggagctgggatcaagttgcggcactctgctttcattgtttggggcatcccaatcaccgagcattggtgccatgctgatgtttgaatttgatggcgaactataccggagaatttcgacgatcccggaacaagcactgggatcaaatcaaatctcagtgatcaaagctcatctgcatagcagatcttcaatccttagcgttgaattagctactcggagcaagtttgccgcttatctgatggagcgcgatcgggagtggcaatatgctcagaacatgtcccaacgaagacaacaaaaaaatacttagaagtatagccttcaaatgaggacgttaaccatgaaattgaagatgcgagtgtgctaacaatgcattgttgttgaagcaagaaagaaaaaaaattaaggttgcgagataaattcgaaggtcaaaagcgggtaccgacggaagtctcgcggatgtggcaatggagggcaatggattttgatattgggacattttatgagaatgactttggaagatcttgattattttacttgaagcccttgaataataaaatttcggtgagaagaacaatgtaatatatcaaatactactctctgtaagctcctcaacaacgcaagaggtatatatagccacgaagttagacctataaatagacattcatacagggtctgggttgtatcatcctacatgtcagactatagagaacgagggacaaataactagagtgcatgataccggtcaaattccaacatgaggtgccaatatatcataaacacatttatgggaggagatatccttgaaaggattttcacattcactatttgcaaagaaaagaatcaaaatatttaattagcaaggctaatgcactttccatccgaatagaaaggccaatagtatttatcaaggcaaaatatcaagactgtccaggctgagcagctggggctggcgcctgcagcgaagcgagcttgacagcaaccttagggaaatattgcgtcacaaagccctccgtgtagaagctgtgcgcagaactgtgatctccgactaagttgtgcgctagctcatggcacagaatcacccaccaatacacaatagcatcagtgcgatctgggctcgggctattgagtagctcctgctcttgcaaagactggaagtaaaagtagttacagaaaatactgcccgcgcgattgaatgcgatcgtcttgccgcccgggtcatagaagatggtcaggctgtcggcccgcatcgagaagatcatgccacagtcaaggaggatagacgcaaagaggttgaacccaatgcggtttttcgcgaggaaggcagatcgttcggtgactgcctttgtgaagaggacgttcatgccactagggagcgtggcgacaaattctagatcgtggcttgggcgctcgtcacagtaggacttgctttcttgaatttgatttgtctctgggcggctgtacacgtcggaggatccatgaggtcggcatgcttggacggcggagagaagctcggagttcaatcgatgcggcgaattgccatttacaggttgttctgggcgtttttgctgagtctgggggtcattgggggcgtaaggcggtggaggtgtggaagacccaggaagcagagatcgggattgttcttcagtgccggagtttgagcctgacggtctaatatctaagccaaatcgtttcgatagattgccaaataagcctctgggtcgcttcggcattgtctctgggggaacggcatgtgcttcttctgacaaggtcttctcgtttttcggggattctgggaaaacgccaggcatcgaattttgtgtctgtgcttcggccctctcttcgtcggccagttgagagtcacgctgagcttgccccgccgcccaggaagcttctctctcttgcaaagcacgcctctcctgctcgatctgtttttggcgtttatcttccgcgacccgagcttcttgggctttttgcttcagaatacgttccacgttgtaacctcgagcccggagttctaagagatcggtcttcaatagcatttccaatgtaagggtagagtgcagcttcggtcgcttcaaaatcaactgcaccaatgcctgactgatctcatacaggtcgtatcgatctggacagatgcataagccaacgcctgaggtcagccgggcgacaatcgcattctttttctgcgtgtgcgacacccgtcgtcctttcagcgatcttgtaagactgatcgatgtcacaacctggactttgaaggaatgctccaaccatcgggctccatgcagaacatagtctgcgggctgatcatgcaagaaaagccgcgcacgctctaggatcaatttctctagtttgtatgcaggggtttgatccgaggcgatactaccaattcgtgcgtgttcttcaacaagtccacttaagggtatagccccaagagtagcgtagaagtcctccaatgcctcttcttgtggagcggcaaaaatgtgttctttgaaaaggttgaagctttggaaatcgtctaccacgacaatgtctttggcagaggcaagacaccattccttgatgtccatatcgtcctcctcatcatggaactccttcgacttttctttgccaccatggtctgacgcagagggtgggatgtctcgactagcaagaaggaattttgctctctgcatctcaacaaaaagatccttatccttcttcagcaccgggagcacctccgcgagagtcctgagaagcatgagatatttctccgaactttggaatgctgcagatatgcgtgcgggttctttgaccaacatgcgtgcaatctcgatcttagtcggttctcgttttgagccgatggccatgaggaagagatttgcctcctgtccaaaatcgacaaagtcaaatatgtccttgtagtcctccccgtctccgagatagcacagcctaggggccacgagccggtatttggctcccttctctgattgatggtggatgggaattgggattataggagcctggcaaatgcggtttatatcttgctgttttagatcagatattctgcccgccaggtatttaaacacaatccgtgcatccctctgcgtagtcgggggctgcttcgcgagaatttgaagacagtctgtcatgggaggatgagccttgactcccagtctggaggcatgggggtggaggttgttcctgagaattttgaaaccgaacaaggcagcaccttgatcggtaaagcacttcttcggagcgcttaagctatcagatccttcaatgggaaggaacggcactattaccgcactgatatcaaacgaaacataaccatttgtgtaatactcctcgaggaaatatgacagagccttgcttgctcgactatctttctctgtggccccggctgacatgagcatcactagttcaacagctgatgggcagctcttgagccccatcatcgtaaggaatttaccctcattgctgctgctggtataaatacccggccattcgataaccggtaagccgagagctcggagcgcatccttcggctcataaagctcggaaatcttgtaacgtgtgccttcgatgccactaccactttcggcagtacagatgctcgtctcctttagtctctgaatgtcgttcgcaggaatatcctctcgtacagaggcaaggtagcggatgagatcaacatgattccatttctttgacgcaggacctttcaaatcactagatatcggagtattgatcagacgctcaaagatcacaccaagctccacggttttgcgaactccaagttggaccaggattttctccttgacaccattcaggccatgaaccacaggcaggtcgtcaaaaagacgcacagaagcaaaatatgtttgtacgggctgcttcattccaagtttcgtggggatcacagtctggggttgaagtgtggcgacgatactttgctttgaagcttgactgagggtttcccactgctttgacaaaacaggcaatacctggcccgaaaaggttgctgactgcgtgatatcttgatctattgagaagatactgcgatttccgcaatttttgacgatccagctaagccaaggaacgatttgcagctcgccccagccaagtgcctccaggtcatgcttgttcaaagacttggtgaatctgaaaggtatcacgctgggcggtacgggcagttccgctggaatgcgctgagggttcaaaaaacaggtgatttccgcaaaaataatcaaacgagtgactccatctttgtcctcgtcattagccactgctacgcgtagtagactctggaccgaagagctatcaagctgaccagcgacggctttacggccaagccatgatatgaattcaaggacttggttaggtcgcaaagtattggactctaattcacgcttgatgtctgataccgtaacttctgtgaccaacccgaaatcggtcagccttttgacaaaatctttagcgccctgtaaaaactcctcaggcaaagcaggaattgagtccatgaagctgagatctttgggtgcgatgcgcgtttgatgactggggatgacaccacaggtagaaaggacctcaatagaggcattcttgttgcacatccagaatgcatcttcgattgtctgtcccaaaacagaagatggggtagattcacggaatgcaaattgatttgcagtatgaatagcctctggtagtacatccacaatgtcttctttccgaatcttagacgagcgtgatggtccaactctggatgcaagtttcgattttatggtagccatctctgcagaccaagcaattcgacaaacaataccgactgcccgcaacatctcgagattccatttgctgatgtaccgtgtgttcaaatctatgctctctcgctccacagtaggaatgacagatggagcagagacatgggcattcaaaccagtcgtctgcgctgtagggaacccaataaagactcttccaccctttgagggtaatattgatgaaagaatttctgactgcgatgaggacgctccagtcgccatgttggcgtcgtaagaaggagttagaattgcgagggttgccttcttaggtggaggcttccgtgtggcccgttccaattctttgctcagttctctactaatagatggttggagcgatgccgtgttgatatgcaagaagaccgatgctgagagcatgctattcatgttgcctgaatctttctggccctcaggttccggtttctgggcattggattgtttctcgggtgcactttgcgtgaatttagagaagaaactcttcagcgaacttgttgaatctcgaaagttatcaaggcggaacaagcttgcattgggattccattccacaattcgcatccacgaagcgtccacctgcgcgatttctcgagtgacattgacaattctcatcaaaccctctgcagttttagtgtcaatgtctctcggaatcgggacatcgacgctgggagccgtcttcttttttgatagccgcagaaggttccaatcatccaaccaaagttcaatctcttgtagtgagacaaacgtcaaactgctcgacaaaaattgacagagctgcagcaaagatggaaccggggaagaatcattgcgatagtccaatacaaaagtggtatcctgagttgcggcttcgccgaggtccagccggcgggtaaacaacgcattccccttccagtagaaggccatagcttggctaccagaagacacaaacggctcctcacaatcatcgaacacactataaaagcccactccgaatgcaccgatcttagtttcatctgggtttccgtctgcgatccgcttcaatcttgcccaatccttttcgctgaatggagcgccattatttgagatcagaagacgtcgaagagtgtggttggtgatagtatgttttagatgtgcggtgggatcatttgatgaaggtgatggtactgtggtcgatggaagggtctcaaacttgatcgttaccttcgttgcagaggcatcggcagcattttgaatcatttctcggaggaccgtcctgttcaatcagtaggttaatatttggatctcaagatagagaacatctgaatctcaccatttgccggagtatcgagccagcactttcgaaatcaatcctcttgtatcgactgtcacagcttcctcatcggcaccagaccccatagtccgcgccttcaacgcgttgaaatccacattcatagccatcttggtatgttttcttctatctgggtatattggggccttatatcttaatcagattagacatggaagttcatctacacctctgtatgaacaccgatgagtaacaagattgaggttgtctaggctgccgtgaatatggtgaacttggggccactgttcggataaagcgcgaccgaagccggggaaacaaaagttgacagaacgctgagcagaggttaaattccagtaaagacaaagaaaagataaaacaaataagattatttggtgagaggagggcagatcgttggagactgcggagtttacgtcgggtttatccttatcggtagaattgccactactctccgccctagtcccgagttatcatctccgtgtgtacacattcataggagaccccggacccgcttttcgtccagtctctcgcaatttcccctattacatgatatccgaaagctgcctagataattgtgtggatgtgggcttaatataattaactgctctcaactgacaggatgggtgttgaccctctgtccccaattgcgcctgtgcgcctcagggcgctcctcctccccatcggcaagatcaagcgctcgcgctttttgagtttcgctgcccgactacaggctgaaaatgtagttcgactaggggatattagtcccgatgcgcggccgaacagaagtatgccctacgcatgatcgcgaggagttggacattgctaccatatatactaacctgctcttgtcctagacatgttttcaccgctggcgtttcctaccggattgattctttatgacctttctttctctgtcccgccgacctcgcatctcgaactatttccctttgaactttacagagagccattggttattattgcgatcgcagatgggtccgaactgcccgagagcactggcgacgagcagaagcaccccactccggagggactagatcggttgttggaagagctcgatggggtgaaggagaggaacccacgggctttgttaaatcaactcgtggtttttgatcaccctggcttggacaagattacgaatggaccggataatgtcctttgggttcctccgccccagacctccaaggccacgacaatgaagacagttctatgcgatattacgtctgttctactctccgaaatggatgaatttgcaaaaaccattcaaagcataccgtcaatcgactcgcccaaagcatcgtcatggggcccgcaccggaacccagaactacggccacggccggtagaccgactattgaatcgtatgactctgcccacccagatatcatcgaatccgcacggcacacaagatggtactccgttgagatctaatgctagctccccagctcctagcgatcatgaaactcctacaacatttgatgagatcactcgggcaattcacctatccagtcgtacaaactcgggaagcagagcaccttcgacagcatccccgaaggagcacagccgtgaccgaatgtctgtcagtggtatgagtgctaccgacagaactaagaatcggatcaagggccgtgccggggtgattattggaactcttttcctgcaggcgggaaggtggcccgatgccctcaaggaactgactgaagcggcgaataacgctcgagcaagcagcgactacatctggcacgctaaagcgctcgagactatccttctttgcctgctgatgttcgggtgggcaggcatggactttcaggtatgtggatcactagcaatgccatcaaataccctgggtactcgtgtcagatcgctgatttgtttactagattccatcagttctgtaccctgttgcagacaaatcttccaaaccttcccgcgactcaacgacccctagtagcgctggaaatagggttatctccctacacaacctagccaatctcttgccagatctttcaaacaccatcttaaatctttatacccgcgcggccaatatcacagatgaacctcttccacagctggtgttctcggagacggtgattcgattagcgcgactgatggtgtcagcccgcgttcgcgatggagctttggatgacaatgctttgaagcacattgtaatgaatgaacacttggttccactactccagctagagcttcctcggggaactgtcttgctccgaaagtctgaaattgctaacttcttataccgggctttgccgcttgcccttggtgcagacctacctgcgactgacgctgttcccataattgttggtgttgttgctgttcttaattttcttgacctgcctagaaagaaagcattcattttgcgtgagcttctttcagtaatggtaccaagtttagtgcaagcacgaaaaattggtgcagcggaggtaggcattcatcccgccgccgggttggcgtctctgagcgacaccgcatttgatgtcaattccttagacgcaggccccggcaatatggagtcaagtgtgcgtctccttcttgcgacaattggagaaatctacggtgttcaaccttcatcgttctacgaatgggagaagagacaaagccaattatccagtgcgagtggtcttcaggaaagcaatgaatatgattcggttgctagtattgccgagcgggcattccgacatgtagttcttgatcgttacggtgatctgaacttgaagattgatgtcctaaaagcgtgcatcaactgctgcgaagcccttccggatttcactggagtcctgcgttttacagtcgagcttttgcagaccattcgaggagatatgatgctgggtgcagcatacagatccccgccgtatctaccgcaagacgaacaagtccgccttctgaataacattaagcgcaccgtgggcgcaggcaccagattaggtgtttctgatatggtagcagagtattgggatgacttcctggtgcgtgatgtcaagttattgtcactgccagatcccaaaagacctgttcggcggtccaaaacggagctggatgcggttaccacgagttcggacaaggcgaaaaaggatccgttcctgtacaaccccttcgccaagcctaccagcaaggcattggaaatgctcactgtcgctgatgaacctgcgccgttccaagtaactttgcaaaacccctatgaatttgaaatcgagattgaacatctgcgcttagagagcagtggtgtgccatttgatgcagtggcagaaaatttcgtcatcgcgcccctctctgtgcaagatatcactgttcttggcgtcgcccatggggaaggcagccttcagatcacgggatgtatcgtgaaagtgcgatactgtcgaacgcggagattccccatcttcaagacattctggaagcctgaacctgaggtcaagtttaagcgaacaggcctgggtgcgaagaagcctcttacagagcgcccggtttcctggagctcaacgacctccaaggatggcaagattgatgtcaaaaaaggtccggaaacatcaacatgtgaagtcaaggtcatcgccagacaaccgtcacttgtcatcgaatctatgtctctatcgcaatcggcgatgatggtccttgaaggtgaagtcaaaaccttcactattacacttcaaaatgcctcttcttgccctgtggattttgtcctgttcaccttccaggattcaactactagacagctacagactgcactgagtaatagagatctattgccggtcgagatctacgagctggaactcaaattagcaaccaagcccgctttacgatggcgtcggctgggccaggaccccagtgattgttcgattgcagcaggccagaaggcaacctttaccgtagacgttcttggaaaacctggtttgcaggagacaacagtccagatcgactactcctacgttggaacaggcccgggtgaattgcctgatatattctatacccggcaactgtttgtgccgttgacagtcacggtcaatgcgagtgtggaggttgcccgctgtgacattcttccatttagcggtgacttcgcctggaagaaccatattgaaccctccgtcgactgtatacaaaagtcggatgcgttgctctcgaccactgacaatgagcccttcgcgcaagtcctcggacgccttggaaaaggggcttacggacctgatcactgtattgtattgcttgacttgcgcaacgcctggccgagtcctctctcggtgtggttgcgcgtaagtgaacaaacaatggctgctctccaaccggaggcgacgaccacggatgatcctgagggcaagtactctgtcgacggagacctccaacctggacaggtttgtcgttttgttctggttttgcctcgcgtctacttagacaacccacatgcctccatccccgtcgtgaacaccggcacacggagacaattcgtcgtcagcgccaacaaattatcatttgaagctgaggcggcctcgcgcgaagccttctggttccgggaagagctcctcaagagagttcttggaggctggaaggaacctgccacaggccgcgaaggatccattgacctccgaaacgtccgactgaacaaccgtatggtcgaagccatgcgactcgaagatgtcgaaatgagattctctctgacctcgccatcatcttcacccgacacttccgccgcagtggaacaaacgggccgctcacgcttccacgtcaagacagacgacctcctcaccttaaatgtcaccgtccacaaccgctcctcccgccctattcaccccatcctccgtctccaacccagccttcgccaccagccaaacaacatcgccctcgatctaacccgtcgtctcgtgtggaccggaatgctgcagcaagcactccccgtcctaccatgtggagagtctaccaacgcctccatcggtgtcacggtcctctgccgcggcgaatatgagttcggcgcaagcgtcgaggaagcccgactcatacgtccatctttcgacgatgatggtgatatccctgctgaccgctacaacgacgatggtatcatggatacctttggtgcagatgtcgtgcggcgacgacggatttggcatgcaaaggagttgtgtattctcaatgcgagcgactgatgatctcggtgtttgactgttctggtctggtctcgtgtcatttgaacgtgagcatagacataatttcatcttgtctaactcctgtctttttcttcttttaacttaattcgatgatgaccatgtagcatacatacccttaacacccttctgtgcaaacttctgtctagatacctcaggcgttgtctgtttcccactgcaaatatatttgaaatctgtgagagcatgatatgctgttaaaaggatgtatgttcacagaatacgcctcaatctgatatgttcctacgaaaatacagggatttactaaaagataactacgatggtcatggatgttaggtgtcactgcggggttatctcgggcttttccccgcatttcctttaaatagatcgccgtgtccttcacttggatattcactttcaaattctccctcaatcatggcccaaactcacctccttactttaaactataaaggcgatcacaaaaagcctgataccatctatgacacccaaaacttcctcgataatgaattggttggctctaaaacaaccacatggatcgaggtccacgaccccgcaacaaacaatgtagtctcacgagtcccggaaacaacccttagcgagtgcaaagccgcagtgatctcagctcaaaatgcattccccgcctggcgagacactagtatcatgaaacgacaagaaatgatcttcaagttgaccaacctggtccgagagaacatggattccctagcaatatccatcgtcacagaacaaggcaagacctttgccgacgcaaaaggtgatgttctccgcggattacaagtctgtgaaaccgcctgcggaatcaccacacagcttcccggcgaggtcctcgaggtagccaaggatatggaaacccgttcctaccgtctccctcttggggttgtcgcatccatctgtccattcaacttccccgccatgatccctctttggagtctcccgattgccattgtgactggtaactgcctgattctgaagccaaccgaacgcgcaccaggtgcttccatgatcatcgctgagctctgcaagaaagcgggtttcccaccgggtgttgtaaatattatccacggatcgaaaccagcggttgactttatcttggacgccccggagatcaaggctatctccttcgtcgggtcgaacaaggttggcgaatatatttacgaccgtggcaccgcgaatgggaaacgcgtccaggcaaatctaggcgctaaaaatcacgcagctcttctgccggatagtaataagaagcatgctttgaacgccatcgctggagctgcatttggggcggctggtcagcgttgcatggcgctaagcgtcttgattacagttggtaaagctcgcgaatggctgcccgaattggttgagaacgccaaggggtaccaggctggaagtgggtttaacgcccgatctgatctgggtcctttgattacgccccagagccgggatcgctgtgtagacctcatctcgagtgcggagaaggaaggtgccactatcgcgttggacggtcgggaatacaaacccgagggttttcctaatggaaactgggtatggaaatcctgagtcccagtgtttacttcaactcctataaactatcctgctaacacgtcaacttgataggtcggtccgactattatcaccggggtgaaacccgaaatgagatgctatcgagaggagatcttcggccctgtcttgctttgcatcgaagctgacacaatcaacagcgcaattggcctcattaatagcaacgaatggggcaacggtgcagtcatcttcacccagtccggatctagcgcgacgcacttccagaagcgcgtcgagtccgggcaggttggaattaacgttccaatccccgtccctctccccatgttctccttcaccggtaacaagcgaagcgtggctggaacgggactgctcaacttctatggcaaggacggtctccgattctatacacagtggaagactgtcacgtcgctgtggagaactgaagatgcaactgagcttgagaagccaacctcaatgacttgatttggtcgtgacggataagctgcatacggtggattgggagatttttgataggcacagacatgtcgagcattttcttcctggaaatcattgcattaggtgcattcgtagtattaacaataatagtcggcgggttatacagcctctatccttaacgtaggattccaataacttttcaagcgacatatatgtaagatgaccatccgatgtcttttttagataacgagtcgacatcgacaagatactgactctgacttgagttgcaatttacgctggcatctatatctttttgttgttcaatgactgatcattctgttctgtaaccaaagacagaactctcccaattgcataatatattcccgtcaaggtggattaaaaggttggtctttgagaatgacccactcccccacagtgggcacgccggtatccactctcacgggccgatattcttccgatctcttgatagacccacgagtttagataacttagtgttaacacatcaggtgtcacttgataatttaatgccagaagtatcgactactaagcaatgaatcgagattataaaggggctatgttttgacataaatgagtttggatctcctatttgcaatttgggttggcatactggatccaagggaattagatgctaccaacaaagtagtaacaatgttacaatacactcaccgatctgttgagataacaggataaaatgcatagcaaattagacagaatcttgcacaagtaactttgctgcttggcaaaacagtctggactatgtgctggctcctattgaagaacagagtcagggttctttaagctcttggcaataaaagtcagcaaaggaatgcgcctagaagaccagggtaatactcaaggtacaaaagagcgttggaaggaaatttacacccttcactcagagtgcttgaagtacgagtcaatcttggcgggttcaattgagaaaacagttctggttccatctagagttgcaggcatgaatgtcgcgttttgcacaccctagagacaaatcgaggctgttggacatgcactcaatgatacccaattcccgcagctgtcgctcatcttgagagaagatggcataacttggcgttcgcttagatgccgataggttccgggcattcatatccgtggacaatgttcccatcgagaaaaatcacaaattgctttcatagcacaagataagttatgatacactatcacttctgactttttttgggggtaggacgcggagccacatgaaatctctattagaaggtgctatatgcggaaaaataaccaagggacaagaaatcacaaaattcctcgttcgaagtacgaggaccaaacttgaaatgagttgaatagcatgattttatcgccgagttgaaccagctaaataagtatcattgaaactggcatcttctatacagttatgcttctcaacgggctgcaggatgcgctaagaccgccacctgcatgtctatattctaccaaagaccttgtttccgtccatggagcactgtttcgctgctctcttcaacagcccggccgggctagctcaatcggtagagcgtaagactcttaatcttaaggctgcgggttcgacccccgcgttcggctattcctaaaaaccaaacctgagatttcttttttgctcttttcttttttttttcgcatgggaattggatgagtttttcaaggtccacttaggcctgccggctccggcggaaccttggctagcgtcttggcgtttgtattacctaagcagaaaccaaggtgacctccttgcacacttggcaatgctcttcgcagtaacaactggcaggcttcgaaactcatatatagcaagcagtttattctgttcgagtccaagcaaagacttcagctgctcacaagtatcagatctctatctgttggaaaagtttgatgcagaagaatggctcaccgttcaacaagacgtatatagctcattcgaagctctgcagtgggaagttaagtgaaaagcactggatcacgttaccgccgcactgacctctcaactggtcagctcatcggatacgagtttttctgaaacacaccgtactttaacatctacatatacccttgctgcatcatcactgtgatgtgttggccatatgtgagatctttaggcgcgtggcctaagggttgtttgttgaaatatagcctccgttcattctcatcctctacccgcatcctcgctctactgaaacctgaaaatctcgttcccatgaacgattcccaattttctattaggccgaagcctcagaatcccaccgcacaaaggttgggagaagttctttcagtatggcttcctaacacacccgagggcctttacgatcaatatttgcaaagtctttctcctacttatgatcatttgttgacatatttacgatacgaccggatctggcgtttttctgaacatacccctcacagcctgtcctatcattctgagagtgctcttttgtcctctccggtgtttgtagtgaatatcggcgacggcgatcgagttatagatcatggtgactatgatgggacagaccctgaatccatgcgagacctagaattacacctttccaacacggatcctgattcaaaggatcaccctcgctgtcgaatcatctgcgcacaacatatcacgtgtttgagcatggaggcattgggtagtggactttctttggaccctaatgtcttcagtcaccatatcgggacatcattcaaggacattgaaaagagtacaggtatcaataagctctgcaacacaaatattggccatattccttcatctgtcggtacctacgagcacgagagaaaccttcaaatcgtcaaaaggcacctagggcgactttccattgccaatgtggagcatgcaaaagatctaaccacccgggattcgattgtcaagtccatctaccttcatcaggaccatcccatcacattttctgtggatgtgccacgaacgatctatgtgcaaggatatcaatctgaggacgacagaacacaggctattggaagattcctacgtacaagagtgttggcactacaggaccgagtgctgaatcgtcgcattgctcggcagcgatttgctgacgatagcatgttctgcgaccaaggtgaacgatattcacaaaacggccttgacatcctacagcacattaccatccatgtcataaacgacgcgaaatttcaacaaggtatggatgactctgtgtttacacatcaatgagatcgcacaattgaccaatttaccaattaactaattttgttagtcttggttttgtttccaccttgtccagaatttgatggagataattcagacaacgatccttatgtttttcttgaccatctgagaaagcaagaacataccaaatcattcaaggaattctgtctcaatcgggataaaaaggactatgaatccgcaggggcatcggaatctcgacggactatgtctcaagacgttgaaatattctccaatgatattcttgagaatcaagctggtacccccaaaggactaacggacgtggtccaccttatacgatcttacgctctgaatgcatggtttgatcgtctgcagacattgaaagaccagcttgaagatctcagtcttcaaagcctatcccatcgaagcatacaacatgacgaagatccacaggattcagaggaggaaaaccctacatgtgatggtctgattgatgaagaagggatgaaaggtgctattcttcgctacatcgcgtcactcgatggtgaatgccagcggttgaaaattgatttgcatgcggcgaaaataggattttccacaaccggctccgactctgttcgaacattagaacagacaatggagaagtatactcacatacgatcccaaatgagcaaccttctctctgaaacccagcatttactcgacatgaagaacagcaggatacaacaggctttaacaactctcgaaatcaaagaaagcagaacgttcatcgaacaggcaaaaacagtgaagaggtatgatgttggccaatcttgagagaattaggactgacatatgctaggcttatcataatatccttcctttttataccgttgtcctacgtctgcttggcattaagcatgaaattttggtaaatggattgcccaaaggcattgctatgacattccccggcgtttactttgcgggctaaaggcaatgagatcatcataatgactccaaaatgtgttgagacgagacgccgggatccctgtttatcaggctagctagcctttatttgtttgtaggggatattctcctctttcctctcccctcttgtcaaaatggcatgaatgaatgcacgtacgtctgcgttatgggtctatgatgtaagggatataccccgtagtgtggggcctatggggcttcaaggttaaggctcggcaggacgggatcatcctttagttcaggtggggtcacgtgcttgtctttttctcatgtatgaagcccctgatttaatgcaagccttggcttatttatttcacgtcagtctcttcgtctatcctacgctttcctcttgaattctctccaccacagatcaacatgagtggctatccagttttgcagatgcctgctggggcaagattcatcgccgtgggggtcgcaggggccacaatcccacgggatgttctgaatcaaccttcaagaccatgcaacatatatcatacatcggatctatgtatcacccgcgaaaagcttatctaccagactctgccgagagagttaaaaaacagattttgaatggggtgtagtcagaattcattttctcccacatagagtcaaaaatggtctttcaactcctggaaactacgcataaattaattggataattcaatacttggctaaaattaaaaccgactatggtagtttaagctatctatttagatcgggaatctagatgtcctcgaacttcggcctaagctgagctatatatacattcagttcgtcatttacgcaaatatactgctgtcgctacatgactgtgcaaaggagtccgccggcgagggctaaagaatgttagtatcccaattttctggagtatgagatgagatggcttacctccagatatgatcccagacgccagacctgaggcaataccattggcggcgccattgaacaagttcccctttttttcactcagcttttgataggtattgcgggcctcactaacctcccctcgaacagcatcgacctcttgctcgtatccttctagttcaagtgctaccttccgggaattcttagcacgtcgagcggtgtccttgcggatttctgcaagtgactcctccatgtcgcgtagctcttgttccttagctgctagctcctcgaaaaatctttcttcgagtaccttgagtttctttttccaagctctttcttcatccttatgtaaatcccgcatcgacttctccagctttcgtttattatgctcagctttcctcatctgattttccaaatccaccttaagctcctgcatctcgatggcatgggccgtattcttctgggcaatttcggtctcgattgcctgtttgagctttttcaactcgagcttatgagcctggcgagctttgtacagatccccagcgatcacaatacctgctttcgtctcgccgatcactttcccctggtcaataatttcgcgctgcagttccaatacctccggaagatgtttttcagattgaagtataagatgtgtcacgatgcggcgtgcagaagtaatttcttctaacgagcccaggcgacccttctcattgtggcgaaacgttgtcgccccacgagaaataaatctaccaaagaaccgttcttccgacaggagctgtgcttcacgctgctcacaaagcggagatttttcggaccacatagttgtcgcgatggctagagtggaataagacgcgaatccacacatagccttcatcatgtcaagattgcgcatgctagaccctgacatgcggttgtcggatataggatgaagcattagtatgccgtgaatgcgcacgccgtttgcatacgatgcgccgaggtaagttgcgaggacgcttagtgtgtcaatgtctgaacggttcgtgtcgttgaatccgggggtatcaatgaggtagactttgtggccattgcagtcgaagttgaacacatcaatggaggtggtgcctggtggtagtattagccagtcatactgagtagaagccttggtgtgagtcatggaaagtagaaacgctcttacatgagtacagcccgtggccaacagtgacatcttcgcccgtgcatcgaccgatgaaagtgctttttcctgagcccgtcatacccatgacgaggaagaacctgtcgttggggctgggcttagtgacaccggtaaaggctgcgaagcgttcagtctgactaaccacagagcgcatgtccatgatggtttgaattttgcgattattgaccagccaaagtgatggttaacaggctgcggccaaaagagcgaaatgaagacaaggctatcggttgagcacaggaataattactggtctaacttcaaaatgcgtgttgagagcgataattctggagcattagcaggcactttttacgtgtcataaaaaccccccacttgactttacaagacgccaaatatgggggtcaattcaaaaaagcaaatatgcgaggcattttggccccaatatgcgctttgactggactcaaaaatgagcttgtaataagccgagaggcgtagcaaatggtgtacccagtggaaaatgaagtgattctacctgcacacctgggcatgggagtcagcccccgggatgaggctgacaaggtgagccacgcagcaggtgccgtgtttcggtgccttatacctgaaaggaatgcacttgcatcggcgagacacacatgcagcttagaatccaacgttggaggaatttgggctgacttgattggggcaaaggtttcttggcgacgacgcggtctcctgtggcctttgcccgggtgaacatggctgcataacgaagctgaggcggtaagatattatccaatgagagagttatgttctgctggcacacttagttgcccgtatagacattgaattgtgacggaagccatacagcgcattttaccatgagaacataacaaaaacaaaggttcctattctgaggtcttgggtgccgtattcctatttcgaggcttgatcctgttggtgcttttgggcatcaaacaccgacgggcttccactatttatatccgtcctagcccccttcattattatcccacaatattaactaaaagcctatcagattgcctctcatgtcagtcagatccagctttactagtatgtcttatacttcgcataactaggaaatggtactaaggctcacaaacacacaggacaatcaggaaatcgctcagtgcatggaaatgaatcacctctaagcactcgaagctttcgcggaggtcacgagcccaggtaagtggctgactatagtccaatgtgttgtggccaccatttaatgattaactagaccgaccgatgtattcattgctgtgatgggggtcactggctcggggaaaagttcattcatttcgctttgctcgggcaagtccgtccaaattggccatacacttgacgcatgtaggtgaatcgctatacgaactgagctatttccttggtccaagtctgacagaggaacaggtacctctaaagtcgacgtatacgcgtacagggaatcatcagatcgaactgtttatttgatcgacacgcccggctttgacgatacatccaagaatgacaccgagattctaagtgagattgcgatatggcttggcgactcatatagaagcaaaattctgctccacggaatcatatacctgcatcgtatcactgacgtacggatgcaaggttccgcgagacggaatatccagaccttcagaaacttgtgcggtgaggatgctctgaggaaagtaatcctcgtcacaaccatgtgggataaggtccaaagcagcgagggcgacatgcgggaaaagcagttgaaagacacaaaggatttctggggttggatgctgagcaaaggcagcacctgtcatcgacatgataataccaagactacggcgagaagtatcgtacagcggctgacaaaacacaagagccccataatcacagatatacaaaaacaactagtcgatcagaatctccaacttgatcagacagctgccggaaaagggatacagagcgagactcttaaagagagagcaaaatggatgaaggaacaaaaaaagttcgaagaagagatccgagaggcaatgcgccaaaaggaccgcgagaaagaagagataatgcgcgaggagcgtgatatgagtgcggcaatgatcaggaaggctaaccaggacatggaagccatgcgcttcaacatggaagaacttatcgcccagcgagaggagcgcgaggcactcttggaagagcgcttagaaaagcggatggagaggcagatgcgaaagaagcaggctgctcatgacaaagagatcaaacggattcaaagagaaaaagaggccgagatgagaatatcaagagaacaggagaagcaagcccaacgtgatcgaaaaaaggtggaagagaaaaacaaggcgcagcagcagagaaaggcggaacaggagagaaaggcaaaggtcgctgaagccaatcgccagtcgcaaaactcttcatcgaaagttcaaggctggtctcctttttcggtaaccatgggagattacagttgcgctctcagtggaccaagatgttaccaggcgtacgttgacagtgcaagggagccaactgcagatacttactaatcgtctctaccaacagctctaggggtggctggccgaaattacaggttggctcggaatggattggtgccgtcagctatgggacttccggcacatggattgctcgttacggaggaggaacttggcgtaagcaatttctcaaatctgcgacaatttacctagctaagagatgtctcagagtactcacttgagcattacccaactctcgcaggcaaacttgcccatcacggagacagtaatcttgaattttgtgtcctcgggcctgggcaaatgtactatgcccagtgggcgaatgggttctggtgcagcgaagcaacagaacagatcaacaactatttaacggagatttacaatcgatcggatgattctaaagtgcttgccatggcatttggatacaatggcgcctatgtgatttcatttggatgggccactagatcgactatcaggggaaagtccggccatcaaagggatttgaaaggatattactcggatctagaacaattcgccgacgcaaatacttctttggatatagtggtgagtctctcgaattgccttgatcagatctcggaaatctcactttccaacaggccatcgcacttgacccggatagcacaacagattatatattagtctacaaatccggaaactatcggatacgctgggtttgctcggatccccggaggtcacaaatcattaggagttggtgggaccaagaatgcaagcctaaagaggctgtagcgcctacacagtcaacacataaggcttcagtgtcgagatctttcaaagaaatgctctcgaagatcgagaagtacctaattgatgggaataatggatgagaaaccgggaatatatatctatcatcagcttttgtggcagttcgaatattcggatttctttcgtgctattaccttctctgaggagacacgaatcaaagcaactcctgatgaattataaaagggaaagagacgggtagaatgtaatccggtccttagcaccagatttcaaagcagatgtaaccacagagccaccctgggctccggtggcaccgacaacagtaaggattttggacattttggatcaaagtagaaaagatgagtgtattgagatctaagagataaacagtagaagcaatgacatggaagatcgaatacggtccctctatatatattttgactactacacataagatcgcctatacatggacgaagtataccacggtacagtgatctgcatacacgctaaccccatggggtcgggactcagggctacaataaccccgaaacgccggattccgcatcttcaccaacctttctctcttatttttttctcagcaactcgtcatgtacaacataccctcatctgtctgcgttttctccgcataaacaagcattattaatgaactggcccaccgcacccggagctcgggttgtcgatcgatattgcttcagtgttccacttcacattgtgcttcaatttgccgtctcatcactcaataaatagtccccttatggggcttttagatagttgccttctgaatgttatggcggtccaaagatagacaggtgataccattggcagactagcaatgtacgtggcggtgaagtgtgtaaaacaatcgtcgtttgtcgccactttccacatggtctcgggagtcaaacgttggactcctgctaaaatcgaaccatcgtgtatgagtcttctatgggcgacggatcaaaccactacaacgtttatctagtatacgtccatcaattaaccttgagcctttcaaagagtagattacctctccctttaatggtagcaccatattagagatagagacgagagtacgtgaagaatgcgtgtagtaattattgggaacatacggagaggtcacgcgacctggaataatctactcggcataaaatattagtcttggcatccataaagcttaattattaatactgtattattcctccgtcttaccgccctaccttctcagcacggtagtctttttgaattctaccagtcctaccgatttgaacttctttcagataaaagagcagtaaattgcttcaaaaacatacctcgtattcattacgctcgcaaaaagccttgtgatcgaattcattatagagttcatctggctcaggaataggctcagccctcagaagctcttcaagctatgattgcggcatttccgattgataatgcgccatggtagctagtaaaaagattggaacgatagtttgtaatgtgtatatacacagatactatatatattagatgtagagttgtttatcagtaataaagtataagaatgtacccctcgtaaacatacatgctccataccaaaacgggatcaaagataccgtacgatttccaaagcaaacagtgtttacataagcccaaactaggggcactagcgtaagcattgaccatggtaccaggtacctacgtcccctgaccttatctgccgaactatgatcaaccgtcagccagccctccgggaaactaccccggacaaacccccttgtgaaggcagaatttggctctctctgcccaaatgacacgcgtaaccactattataggcgacggatcggaccactatatcagctcgccacacgcttttccgcagctgtaataaatatagcaacttacatttgatctaattactcacttttctacggtcgcattgagttcaaattatgaagatatgattgattgattgaattttcaaaatacaaatttcaaactcaataatggagcaagcatagagcaagcaggggaaaactttgaaaagcggtcttcttagaccgccttcccatcaaatatactgccgattccggtaaatcggtaggacgggcagaattctaaagccggtgaattcgggtatagggcggtaagacggaggaataactatggaaccttggaaccttccaaggttggaatatagaattgataactaagcggttttatgaacgccaagactaatatcttaatgaattgatggacgcatactccggactggtaaatgtgaatagagaagaagaggttgtaatattacatagcctgcccaagaccataattatacaggcggtgattaaagcggtgagccaaaaattggttttgttgttgtggttcgatccaccgatccatcgccctggtggatatgccaagacacgctaaacaacaatgtcagctagccttgcctctcagctgaaatgagtatgtatgtataactatgtctacttacccctgggcgcctttgatttctataaattgagtctcggcttccattacactggtggttgtcctctcaactacattgtgctgaaaaattgtatagcaccattcagcaaccatgaacttggccgtcctgatgtcccttgcgggattgggcgctagccttacagttgggctagaagcaaaaagcccatttattgccggtcggctctcacaaacgaagcaatttgagctgaatctgacctgggaatcatttgcgcccgatggggttgcgcgggagcaatttttgatcaatggccagttccccggccctccactgatcatggatgaaggagacgacgtcgaggtgaccgtgaataacttcagtcccttcaataccacaattcactatcacggcatcgagtgagtttttggaaactaaaaagatacccgcatgtccactaacatgttaatagacaggaaggaacgccgtggtcagatggtgtgcctggagtttcacagaggcagattttgcctggtcaacggtttatttccaaattcactgtccagcagtatggtgcatattggttagtcaataatcttcaataagaaatccaagccctctaacgaattgaaggtaccactcacatacttctgggcaaatcatggatggcctgtatggaccaatttacatcaggtttgtttgcatgatatcgagcgcgtcaatgccaatgactaatgtctaaatttatagacctcggaccattcctgcgaacttggccagtgcgataacaaatgatacatttgaacaggctcaaatacataacgccatccgggccccgtctctagttatgctctctgattggttccatatgacctcagaagaactccaagaggttgcaatgtctgcaaatattgatcccttgtgagtgattcaatgagagaagctacaagcaatgaaactgacatggcgatcaggtgtacggattctattctgatcaacgggaaagggcgggtcaattgccgcagtcccaaggaattgactgacatggtgcccgattcggtgaaatctgtgctacagggcatggagtatacggtgaaagggtatgttctgaattagaattcaatacttggagacgccagcgctaaatgggaaataaagttgccttccactcacaaacacctatgcccaaacgacatctggacataacttgagtgcagttccagcatccatgttttacgagtgccacgccactgaagcggcagaagaggtcatcgaagttgacccgttcaacggctgggcaagtctcaattttatcggctcagcgtctgtctcaactccaattggtgtgtactttgccagtctttataagctcccaggctaactagcaaagtgtctatcaataatcattccctttgggtttatgaggttgatggtttatacatcaagcctgttaaagttgatgtatgaacttttacctttttggaattacctttcacggaatacttctgactcaaacttctctaggcgttaacaatcaacaatggtggtcggtattcctgcttggtacaactgaacaaagcgccaggaaagtacccgatgacagtggcaaatgcagggttcaaccaaaagatcgcgggctttggtactctgtcctatacgcatacgcatggacgttcggttgtatcaacgccttcaatcaactacggtggaatcgccacaagcacggatgttgttacactagatgagaccgtgatcgaaatgtttactcctagccagcctagtgagcattcggataaaacctacatcctgactgctggccgcattgagaaggcttgggaatggtcccttaacgggaatcactcctacggccttactttggaggccgaaaagcccgttctatgggaccctcaatctgcggccaaaagccctttggccatcgccacaaagaacaatacttgggtggatataatcttcattttatctggcaacacatctacacttcagcctggtcacccacttcacaagcactccaaccgagcttatattctagtgagtgcttccaaatattgtactggctcttgctccaattcgctgacatttgacttcaagggttccggcaccggcgacttcaattacacttcagtcgccgacgctgtcaaggctattccaggcagtttcaacctgatcaatccccccatgagaggttcgcagctctaattccacagggcctctgtacctgactgacatcattagacacttttactacgctgcctgcttatcaaggtaaaagctggatggcaattcgctatcatggtatgtgatttccccgactggatagaagatcattggctaactagcacggttgaattagttcaaaacccaggggtatggaaatctgaattctgtcgatacccggtcacgtcgctaacaattttaggcattcttgcttcactgtcacctcgacccacatctgacagggggtatggggtaagtttgcaatatgtgtacagctatggctatatttcgatgcaatgtgctaatttctttccttaggctcgcgattctagacggtatagatgcatggccgaccattccgtcccaatatggcccaaatgggaagtggggaagtattgacgcttgacaacttttatccgatttgtacaagagaaattttctctatttatctgttttaattggtctttttatttttcttattcgaatatatggtgtgctgtgtttcaatgtactttttccagatgttcgaagtggaagaggtgagtacatacattctactggagcatacctcccagccagatcctgcttaattggcttttacttattctgaaactattgtactaaaccatacactgcattataatagcattttattcaaggaaaccctataagtggtccagtatgtgttggaaaataattccagtacaatagtttattgtgcaccaatcagctttcctaatggtataaccgggccatttccttcaaactcctcatattatccgccccaaggccttaacttcatcatccaaatgcgtccataaaatatgcgcaaaactacccatcaacatcttcatatgacccagtcgtagctctgtctcgcccgtgcgacatgtattcacatagtcctcgaatttctccaatcccaggtgaatcatgcggtgctgcccgaccaagctcaattcctcgcgaaactcaggcattctcgaggctagctcagggaaaaagtgccgctcctcgatagtgtgatgcagcgtgagttgacgacagaaggataaagcgaggttgaggaatgcaggaatcgattggccattggggcgtttgttcttgacacaagcattgtatgtatcattccaaataatgcggaagttattatgctagaaaacatttagtaggctgtgggaaccgttgtggtagacggatagatgacaggaacctacaaatagatccatatggtctgccaatcgattctaggccttgaattccgacggagttaacttggagagctggattccagcagttgcttctttaactttcgccatgttatattcgatcgaagagcccgtgaacaaatgacgctgttgacagtgtattaaagatggcccaaccccttgaagcgcactctcttaaaatagtatgtagagtctgcgccatttattatcgaaaagtgtggattgatagaaataattgtcgaatcatgccgtaattattatgaatctgcatcacgaaggcaccaattgaccttactatattcgttcggagctcgaagctcgggtaggtgaggtctggaaggtcgctgactaaggtctccagagtccacccgtcccattctaacattcgatcagctgtaagcccggggtagggggatcgttcttcatggactcggagggtccactgatccgcagaatgacctttgttcacttctgcaacacgtgtctctgctccctgccgacagacgatggcgagattactatgatacacttgacaaatacatgagaacagcctggatcatcatcgagctctagtgctgctggattcactactgttccacagtccactgaggtctctggctgcagacctggatgcagaacgagctagtccgtacgagctctagtgaggagacgaaagtgcggactttgaaagacgggtactggttcttgaaccgtgggagcccttgcactgtggtggcaaaccgcacttcctgtccaaagagctggcagaagctgtctctagttcttaagatcatccctgttttcctgtcttgcctccttccatcatggacatatcttccatggtccagctagctctcttttctcttttctcttttctcaaccaaccctcaatatctaagccggaaatcaatatatacagaagaaatgcatctcatgcttgggagctatgtattaatacacaagaatccaaaatagccttgtcttggacaatttttgcgaaatgagtagtggagatattattttattcagccacctggccacagaaagagactcgccggtctcggtaccagccgcaagaacaacccgccatccataaaatacaatgctctgaaaacacaggctgtgagagacggtattaaaagcgagtaaagaaaacaggaacctctatgctatgtcgttgaaatatgatgaccaaaaccgaatactcgagaagagacccaatgtgaggatgtcgttatggagaaagagaagggaggatgagttgagggcgatcaaatgtagataagtcgatcgtgttggtgaatggagaggagggatggtttaaagcatagccttgtactcggatggaggagggggaggaagctgtttcggactggttagcaagcacatcttgaatctaggtccgaacgtatcagttcgaggacagggagtttatcatacctcgagctttgtattatcagccatcatacgctggaagccaataccgacaccctcgatcacagcaaggaagacggcacacataatagcggagtttcgggcagccttataaccaccacggatagcgagggagccaccggtgaagaaaccagcgatgatggcgttgtaaggatcttccttcttgcgaattcccttgattgaacaatcgtatatactgaaaagtcctccccaacagccgaagttaccacctaggacgggcgcgcgcgccttgatagccgtgagagcacctatccgacgttcaccgtaggggctgtttcggaaacccttaacaccgtgccatacggcaccaccgatagcacccatacagaaagcaccgccgaagtcgctcagggcaacccagggacagggatcgcgcgagtgatccataatgtgatgtgtgaacgaagcgagttgagagtcgggggtacaaaggcggatcggctgtatagatagtaattatgaaaggcgcgatggtaaaggtcgaaagttggtaacaagcccagtggaagaaagagacttgtgaagggcgtgaaggtagtaaaggtcgacaagcccaatagtgagagatgcgataacaagataagggcgggtcgaggacttttctttcccatgtcgggcacgtgaccatcatattctacccggtcgccaccgaacactacgacgtcggctgtgtttactcttactttcggattatcattcgctcgcatcaggcatccccgggttctctgcccgggaacgagaatataccggctattcatccctgcatgatgtctcgagaccatcagaaaatttcttcatttctatttgaatactctatggctcttttttcattgttctagggccaagggccaatcggagatcatacatcctaccaccttagaaccgggtattctatgatcgaaagaatgagcttctatagcctcacttcttcatctactaacaaaagaatgtctatcttgacctattccactcacaacctttccacgcttcgcgagtatgagcggtcattagcaaaatagtcggtcgatcacataggatttcgttcaaaatagatatatgcatcagcccatcccttgcaacttaaagtgatgtttgtcgatatctgattcataggtgggtgtctgatattgagttctagacttcttacgtctaagtaagacgttaaagtataactaacgaatattagagtcggtaattgatagatatatagaggagattgatcgtagttgcgaaacatcagattatattcatatttcagtcttttccaattttaaataaatagcaaattgagggagcaaacaacgggaaggccagatgcatggtcaaaagttggtatacctcgcccttctcgccgtcataggaggtgtataagcatatcattgtagctacaaattcagcttatgcattcaaaagcataggattgaaagaattatcgagtgtttggtaggattgaagtgtgacacccgtatgaaaagacgattgataaggcaaatgaaaatgccgagcaaggctcggccttttcggacgaggatcgaaaaatttcgcgaatagcccgagcaaatttacttataaataaagctagctgcaaagagatctgcggtagacatctaggtcctgttccttgttacttgtgctcaatcaactctcggaatgtctacttcacaactatcaaatgaccgggctacgcccagtagctccgaagcgcctgatcgcgtcgaacttgaaaagccaaccccaaaattcccagagggcggcctccgagcttggatggtggttttaggtgcattctgtgtgtctttctcgactttcggatacatgaacgctttcgggtaagctctatactccgcaactctatggtatgataacgaagtctaacatatgaacgacacagagtctatcaggattactacacagagcactttctctccaacgagacttcatccactatttcttggattggatctgttcaggtctgctttctcttcgctggtagccttatcggtgggccattgttcgaccggtacggcgctgtggtaaggacttgtcttcctatcagcaacagcatcattgactaactatactctccatattaggtcattcatatacctgcggtcgctatcgtattttcagtgatgatgacatctctgtgcaagaagtattatcaattcatgcttgctcaaggcgtcttgggtgggattgcttccggcatgctatttgcccccgtcatgacatgtgtgagccactatttccatactcgacgtgctgcagcccttggtgtgacagtctctgggtcttccatcgggggagttatatttcctattgccttgagcaagatgctgagaaacgaatccttggggttcggatggtccgtccgaattgtggggttcatcatcttgttcatggtattgatagcgatgataactgtaagagagcgacttcctcctcgtagcggcaaagttctcttgccgagagcttttgctcgcgctccttacaccctcgtcacactcggtatcttcttcatgatgtggggacttttcactccattcttctatcttccgcaatatgcccagtcttatggcatggaatcacagcttgcgtcctaccttttatccatcctcaatgctgcctccgttttcggcagaatattaccgggcatggttgcggataagattggtcgctacaatatcttgatcatcaccggtgtctgctcgggcattctacttctgtgctggatcgcgacaacttcaaatgcgtcaatcattgtctttgcggggctctatggtttcttttcgggcgggattgtgtcgctgatgtctccttgtattgctcaagtcacgccgagtccggaccagattggtactcatctcggcatgtcaatggccattattgcccttgctggtctgaccgggaccccgatatgcggtgcattgctagaaagatacggaggatacacacaggccgcagtttttagtggtgtcgtgatgtttttcggatctgtgcttgtcgccgcggcgaggttttgtctgcaggcaaagcccttggcaattgtgtgatccctcttcagcctcctcgggcagcttttgcttcaatctgtatactacattagatctgcttttttttactaccactgggtgcgaaaaccttgaaactatgatattatactcttcagaacgacatatttgagcaaggctaattatacatggaagaacccaaaatcagtactatcattcatgaaacctaaatcctccggaaactgttcagtcttgtcagtggatgcatcacaattgagatttcagaaaccaagtaaataccattgagttgagaagttcatcgtcaggaatcatagagctcggatcttctggtaagttaagcccacgtagacctccattatcactgcatacaatcaatacgggtttggatggggcttgtcaacggagtacttacgctgaacctagcagagagtgatctggctgaatgacagcccgccgcgtctgcagtattgtgcagattcggatcactctatctgctgcctctttgtcggatgttgcggctgactctggccacagcttggacttgactaatccaattatcatactgagtaagtaatattcgctcaatccgtgaaatgtcaaattgagcctcttttccaaaatctgtagtacatgctcaacagttgccacgagaaatgtggaaacttcgggaaatattgtcatggtagccgacccatttaaagctttcgattgattagttgcaatcgcaggatttagattagacaagcgcaattgtgctttttcttaccgtgaggcccaaagtttatgtatatttcatggcagatattcagtgcagcaagtagtaatccaatcctacaagcttgttcaggtactttctcatcatgtataagcttttggtaatgatcaagaatcttcgaggatgcctccaatctcgcacgtcggcagactgcagatttgaatgagggacgagtttggatcgcgaactggatgtgcagcaagagtgtatactggtacaggtgaatgctcaacaatctcttcacgtacatcgtggtctgctgttgtcgcggattgttctggggatttttccattctggaatatcgtggagtgcttcttctatctcctctccaaggtgcaagacccggtcaaaatcatcttgctcgcgacatccattgactaaggcacatattttcaatctgacaggcaaagagcggtacatatgtgcctggaaagacgtgtccgtgaatgtggcgaggggcataccttccagaggatcttggcccgacttttgtagctcgtcatcgttgatattcagcggtgattttatgttgaaatcttccattccgacgcttaggggcatcccccgttcaacagaggcctggatatcgagctcaacgatcgtcatccacaagcgccgacgcatctctcgatagtatggtgatattctcgctgtcgagggagattcacgatgatatcctgctgccatagcccaccggaccagtgccccggcgtatgtccagaatgaaccctcttggatatagtttgcacgcttcgcaatgagcaagagacaatgggtcgccaaggtgtcccaggattgaggaggctgattagtcgagttgagccatgattctgcagcctcaatccaatcaagtgcatggtcatgaacggtttgctgattcataacgtcaatgcatatttcgggatgaaagcttgaagcggctgctgccactaagaggaattgcaccaaaaaagaagcgggcgtgcaaagtggactggcccagtgacgattgtaatcagctatgaaagtcgatatattgagtactcggtgtatgatctcgaatctgtcgatatatgtctgtaccaatgtgtccgcaatcggttttatgggaatcaattgtctcagagtgtctctgtctccaggcacagtagtatcattggacaacggacgaagccgataatcatcattggccaaagggtaaatttcgtcacgaagggtgttgatcgccgggtttctggtcttgatttgaacgatgtagggtcggagctcggtaaactgtcactattgaggagatgcttcatatcagttagatagggtgtggcgtacctgttggtaaaagttcagaggatagctatacccatagaacttggtaatagcttcttgtccttttaagtgggtcattttctcatgccaatcggaagagggcctgggtctttccggggtctctgcaggtttacgcaaggccgttggcatggggccagtgctcaccggacggtcatcgctcaacatttcatttactgacgaagatgttgctggattgccacggtaggtgcagctggcggcatttcctgttttcgagcagcgactgcaggatggaagctcccttccacatttcagcttccgctgatagcactggatacaggccaatggggggcgtcgctttttggcccctggcttgaccacacgctgtgagctgattggcccacggctcatcgtttggcttgagatcgattctgacattattagtgcttgccatgagaaatcgccgagcgggagcttttatgccgggttatggtgacgtcggtgatttcggcgcggcaatttcgggctcggcaatttcgaccgtttccaccattggctcgcagtacattttgtccaatcagaggcctacaacaatgtaaatagtgcgtattatggatcattgcggtttattttggcatattttgacagatttattgctgctcattcgatgcgtaggcctcgggtataccagagtctaagtaataagggagctggaaactcgtatccggccgaaacatatataagacttgtgtctattcgagaaaaggctcaatcatctattttatcttcgagaactggactcttctgaagctcaccctttgacagcttccgttctctccttattcagaaccaacaactcgcccagagctcggggaatcctgacagggttaatacggtatcttcatacattctgtcgcgatgtcaacctcacgacaaaggagctttacattaccattaaagctctgaatcgatccggtcagatgagtaaccatgaacgcaatgagaagctcttaatctcggactgcttgggcgtggaagcgtatatcatagacatcatatatttacacacctattcataatctgataatttatccaagctaattgatgctcagacacaaaacatgttggagaaagacaacagcaccgactcttgcattcttggccctttctatacggccaatcccccacgctaggagaatggggacagtattatccagaagtacttagggggcgaagtgacattcttccacagtcgaattcttgatgccgataccagtttgcccgtggcaggtacgtctggctcaactcggatttacctttgacatctataatttgctaagtaaaacgccaggggcttctctgaacgtgtggcagtgcgcggtcaacgggttgtatgaccaacaagacccagatcagccgtcggggaacatgcgcggccttttcacatccgatgcaaacggccaatatgcattttactgcatcaagccggttccctatcccgttccctacgacggacccgcaggcgatattctcaaactgatggatcgccacccttaccgagcccacattcacttcctggtcacgagcgactcttacaatcgcttgatcacacaagtatttcccgatgatgacacttatctcgactccgactcggtatatgcagtcaagtcagatttgcttcttcaattcaagccttacacctcagactcaccgcgaagtaaggggggcaaagaagcgaatgtgcaatgggaagtcaattgggattttagaatcaagcagaaaaaggtgtgataggaatgaattatcgtattcctacgaatcagtcgtccgaccttagcggttgggttgtaccttatttgatatagcaaagaaagcacgttcgccgaaatcttgttcaaatctcttatatatccagtaacaaaaaatacattaaagtatcggcccaacaaaaagttgcttttcatctggagtacaggagtctgcaaccgccagtacagcgcgctatttcgagttttgcctgcaggataagcattcatacatctgaataaattcatataactcaattcaattcaaagaccatgtataaaacggtcctctgtacagttaatgctttttgccgcctttatatacatctgagaatagacttaaggccgcataattggccgaatatatgtttagagtattatgaggatgtgaaccctatgaattaagtatcttttatatgtcatataaaggatacttaggcaccatatattttctccctcgaagtagtacggagtacaaacacataccatgagtctagcttaattattgctaatgaatcacttttcctttcttatgcttaaaattaatcaccgaagtttgatccctgagtgcctgaccatcccaagcgttgtaaaaattcaatatgctgcctaagtattctttgtattggcaagtcatacaaaagatacctaattgatctatctgcggtttggtggagcacctgaccgggaccagcctttgatgacgtgacgtacgaaagacggaaagaggggcctgtcatttttttctatcgtctttctttctcaacggtgttagcacaacaagctcctcccgaattgcatgtccgaatgaaaccggaatcccccaaaacaacccttgaattattatgtgaaaatgttaaacaaagttaatattccacgtctaagacgcgaaaggcgtgcgagtgagggacgaggacgaactgcgcgggcctgcgacacatgccgccagcgcaaaatgaaatgtgatggcaaaaagcctgtatgcgcccagtgccatgctcagggtctaacgacatgcgattattctgaggcgaagctcgttagagagcggaagcagctagagttggctcaactgaaaattggagcctacgaggacttgcttcggaatatcgctcaaagagcggacacctctactgcgaaacaaattacaagcacccttgaagtacatttttgtcgcgtgtcattgcgtggtcacccactaatcagatccggtgaatgagtataggcctatacaacagggagcgaacaccggaattgttcttcaaatgtttcattttcgtctatcgattctctggacaatattgatacggtgggtgaagacctcaatcgcagcaaagaaagtagggctacaggatacatggggaaggattctgaaattgcgtggatgcaacggctggagtcgaatactacaagccagagcgacaacccggattctttagaaaaaccattgaaagaatggcctcctgttaatgactccatcgtcccagtgaactatcgtcttgaccatcatcatttgtccgaccccgaagtgaggaatgctttcgtcctaccaccgaaagcgctggcagatcatctactccaaatttatcgcactaacgtcgacatttctttcccaatcatccgatggggattattcatggatcagtatcgccgcctattctcagggagcttgataaatcccgggaggaggtggttggctgtctttaacatggtccttgctattggcaggaacttttgccgagtctccaaacaagatctgcaggtttacgccgatgacgacgtgttctttgctcgagcgaaatccctgaacatttcggagactgttctctttggctacgaagatctgcaacaagtgcaggtcgagacgcttatgacgttatacttcctaactgtttctcgggttaacaggtatgacccccaaaattgtgttagaagggaattctttcccgtgtgttgtatgttatgcatttctaacgaactcatatatcttggaaaatggtaggaatcgccgcgcgctcaggcatcgcattaggactcaatattcgaagaacgaacaacatatttgatgcggaagcaaccgaagcgcggaagcggctatggtggtcgatcttttacctggaacatctgctctctgccatgactggccgagcctcttgccttggagatggttcctgctctgcacctccaccgctaccctttgaacactcggaatatgagttttctgatgtcggtcagtggggtgatggccgattagctcatgccggcgatatgcaatggacgatcttccagagcgacgaacagatcgaagcccaacatacgtccttgaagtctatgcagcccagcgcgtctctctacttcttctatctggtagacctcgcttttatcacgcactccattaccaatcgggagcacagtacgagcatctttcgagatggttggattcagatcgaaagccgcattgagatttacactcaaaagctagatcaatgggtatctggcttacacgcttccttggcttttgaagacaagcatggtaatcaacaccccaggagcagatcatattatcaggtctcgttagcattgcactattacagcgctcgtgttgtcctcaatcggcattgtcttacacgcccagaaaccgctggaaagagcggcatcaatcttccacgatcccagttttacgacaaaacctcttcggcctttcttcgtgcatctttggcgctcatcgctgttctaccagatcaaccagatacggtttgggcctacaatgtcgccccatggtgggggttcctgcattttctaatgcaagccactatagcctgccttatacatttttcggttctctcagtgccagcgagtgtcgagactgaggaaggcgctcccgggtctgtggaaacgcctgaagttgttcttgctgcgacgaaaaaagcgctccactggctgtattgccttgggaaatctgatgaggccgctcgtcgagcttttctgctttgcaacaattgcattcgccgtatagcctctagcaaaggcctggatttgagtggtatgccctccacgattgatttatccgagacgtccagcgttgcccaatctacggagtcggatataccaagagagataagcaactcgaggttgcaacaagatcagggtagcgaatcaatggcctctcagggagttcttgacgatgaaggaaaggaagatacactgtttcaagagtccgaagagccacgaaaatctcgagacatcgtacggagcctttccgccgtgcttgacactgatatcgccatgtcagagtggatttcggacccgaccgacgcaaattttgaagagttattattagtgatgatcgggcccaacgtatagttgcgctctcccatggaatgtgggctataatgagtaacttgttcaactgggtaaatttggcatgttgttattcgcaccatacagatcacatgatacccatattagataaccaatctaatttattacataatcagtgtcgggcaccgcaaaataggtacgcatatgacgtcatatacgtggaagcacatgttaaattcaacaaaaggaccaaatttgttgggccgtatctgatttcaactcttataccatagatgtcgttctctacatcgctctgcttttctctaatgtcacctcatattatgtaggcacgtcatcaacaacatgattggaacatctactgccgagtacttgttcattcggctttgcatcctatttcttcacaacatcgcaccaatcagtattttatacagcgttcaattactcgtcgctcaattctttcatctaccaacttatttcgaacgcatacccttggctatccaaatttggctcattgcagaagccgtctttttcacatttgtctacataccacttacatacgcccttcgcaattctcctatctaccacaaacctttgtccacagagctcagagaacatctgtttcggagctgcaataagaatgtgcccaatgtggagaaatacctcagccaatggcttatggtctcagaagctgaatgcataaagcgcgataatgtgaaagactttatcagatggtcattattcggacctgaccatattctcgagcaagaccagcagcatgaagaggaaatcgagacctacacagtagaaattgagaagctgattggacgaaaattgtcaccgggcaggatggatgtgaaaggcctaggacggcttttgaatgaagcagggggttcacatcgaagtctgctatggtacagtgttagtactcgcttcctcctctctatgtgtggtatagccattttgaactgacattccaattaacttagtgcatttccgtggttgataccataacgtactgcaggatgttatacaatggattccacttctatcgcaattcgttctcgcgattctttaccgtctttccatttcgccctgtcacaatattcacgtcttaccgatcaccggtgcggcatctcacatactggcatcgacgacatacatccaagacacagctacccgtactattcatacatggtatcgggattggcatgtacccttacgcaggcttcctgcgagagttaaacgagcaactacaggcagacgccaccgacgatggtgagatcggcatcatcgcacttgaaatcatggcagtaagctctcggataaccaatcctgctctcgaaaaggaggtgatgatttctgagatcatggaaatcatgcggtatcacggatgggacaagatcgtgcttgtgtctcattcttatggttccgtaatcgctacacaccttctcaagtctgatcggttcgctccgctcatcgggcctgcggtcttcattgatccggtgtcattccttctccatctgcctgacgtggcatacaacttcatagcccgccaaccagcgcgggccaatgaatatcagctatggtatttcggaagtcaagacattggagttgcgcatacgttagcaaggagattctcttgggttgacaatattatttggaaggaggagctcggggtgaaggtggaaaaagatcaaaagggtagaaatgttacagttgttttgagtggtaaagatttgattgtggacaccgaaaccgtggggcagtacttgatgggttcatcagaggtctggacagttgacaaggaagcagcacaagcatggaaaatcaggccctggattgggtgcggacttgagacgctgtggtttgaagacttggatcatgctcaggtttttgattctgagactaccaggcggccggtcatcaaggcgatctctgtatactcaaagaccgactgacactgttctgttcgtgtgtcatgtcagtccatgattacgacattttcacgaagtttcttgtgatacaccggtttaagatgcgaatatgcccaatactacctcttagttcaagaacaatagataagtatacttgtccctgtcgtatatcaagggacctaactacaaattaggtagcgaaattgataaggtacaggattccatcatgttggtactcatgcgattgactaggggtttagataatgcaagtattcagacagacgttgctaatgtatccgaggtatatagcttatacttttcttttgctatgcggaattgagatgttgagtcgaatacacattatcattgaataaaaaacataaaaaacataaacaactggatactccaggtccttttttccaactcaagatcaccccaactcaacctttccctccgtcccagcaccccaagccaaaaacccactcgcattgaacgccctcctgctctccacaacactcttcaagtactcaaaatcccaacaccgtctcgcaaacccgccccccaaaaacccatgctccttatccactgccggctcaagcgtactatccgctgaacaggtaatagcctgggcaaggtaatcaaagcagtgcgctacatggacagagcggttccggccgaagtcgaagcgttgtagctcgggtgtggtggtgtaataggctcgccggaggaggtagaggcagtggagttggtggaaggcggaaggaattaccacagaagaggactttgacctcgaggtatctgcggttgaggggatgaagtagcccaggccgtctgcggattctgttattactatatcttatagtaggtgatgagatgaggtgattgaaagagaaataagaacctactgggtattaaagtatcccatgtcggctccgagacgttcccttcaagcggtggttcctttgagaagggggattgatacgtgaattcacctgctatttggcggaggggcaggtgaggtgctatagatatgttttctggagtcccggattcatagctgtgcgtcgttgttgcattggagatgtatatggtgaataatactccggttatgaatgccgtgataaaagagaagacgaagaatatgatgtgtgcgactgtaagttgtctgtttagtggttttctgagatgaggttgaggctcctcttctccgtctaagtcttccttcgcgtttgagaggggcttatactcttgtgcttttgcagtcaacatggttgtacgatgaactaggagcatgtaaaaaaaaggtgaattcacagcttgaggacgctaaagtcgaaggaaacattagtacctgaacgaacccctgtgcgcttatgacgcatacagcaatgcatggtcccctttagtaataaaatcaaaaagccgcatcattatggtatgtaaagttaagttacttgagccagaaactatacgtacaatcaaaaagtcgtgaatgtattctaaactgcccagagagactaagagactacgtacaacatatcaccaaaaggcatgaagctaaaagtaaaacgctatgtgggctaccgttgttgatatatcaagttctatctatcacattctctatgctttttcggatcaccgactcgtttgtgaatcagttacgttattcgatggtggcctgcatatctagcccagtttgaaataggatggtacagagtaatgctgtaagatatcgcgcgtaatacttgacccaatatcaaatacagtgttgatctacgtatctcttagcattctagtacttttgatcacctttgcaatgatataagagctgagggggtgtaagcatactttacataccttttgagtgtatgactactattttgctgctgacctgcaggtaagagaggggttggatgcacgtatcctgcaatgtcagctcgagcgaggacgcatgccaatgcatatgcacctgttagtctatttggaggtggcttgccggtaataccagtaccaataaccagcattaatcgattaccagcatatagaatattgtatgcgtttgtaagagatactatatttattacctgtggcttatgtatgaaagttgggttctcgcccgagttggcatggcagggtagacgccctagactggacgatcagcattcatccaggttggacttggaagtatgtggtactattcattcatagtaaacaaattgttatattaatagtatccctttcctcttgttgaataagcatctcacagcgccagctttccaacttccatcaacatcatctttgacatctctatcctccactttacaacaacaaaagagagctcagccactcataatgcatgtatacctcctcgtcattgccttcctaggcgccatggcattgggtgcacccgcacccactgagagtaagtatcacaagcagagacaccctactgttggactaggctgacacatgctatcaagccgctgcggttgtcagacccgtcaaggttgccaaagaggacaatagagatagcaagacagatagcaacgggaagaatgtgtttttcgcagatgggttctagagggggtttctctggaaaagccagaagttgtatcttcaaactatacttgggattcgcaagatgtcgttctcgatcgttagtttattatggggccaatcctagtcctaggtctacatacaagagatcttctctcttctctcaaacacaaccgtactacttctatacctccccagccagccctgtcgcaatcgactcttcaggtaacccgaccaagatctcctcctcgggtacatacccctcatcaaccacgtagccactcccctctggacaatgcataaaccttttcaacccagtctcatcctccggcttctcaggccgtctataacaagacgtatgagctttcgcccaattttccaactccccccagttccgacaaacccgattctgcccaactccactaacaacctcgacccttctctccgtagcccgaggtgtatcatccgcatcacatataatctgtcgcctcagcgcatcaagacaatgcgcgatatggtgccaggttctcgtctgtgtctggccttcccgaaactcgaaaaggctgatatagatgatcttaagacagtgcagattgtggaagccatggaggatgtagattcctttgctggtgtcccagggaaagcgctgcgctgtgcggaggttgtgggatgtagcgaaggagtctgggagggcaacaacgccgctgtcgatgtttatggagtgccatagggtatccgcaagggtggtatttggggaggagtaatcggttaggaggacgtagggctctgtgtgagtgaggtggaggtcggcgtattttgaatgagttctatagggttcggggtttgcggcgatgatggagatggtgattatattggtgataagagatagaagcagtataggaattaggaagaggaatcgctgcctgtaggggttcgagtttccagggccatctgcagagatgtttggatcctggctcgtcttgtcaatattgttgagaagaccggcgaattcttccctattctcagatggtgtcgtcctcatggtaggcagatagactcttccataattttttacttgaatcggagggtcataagactagagtcggattgacataatttctcacaccgaaattctgtagtccaaccaagtcaaacgatgtacacccctgcattcatcacgcccgcctgcagcggttactcgaaaatcttgccttaacatattccaaatcaaaccacctggattttcgcccctctaggagtcagacacttagctgcaagtcacctagtcgagtaagaatagcgagctactagtggtcatgcatgcatccctggtattcgtacgacctgcggctatcccttagctggccagtgatcgttttaattatcaactcggttgccttcactaaccagacttattcatctttaatattgagatgtattccgatattagcatctactatactatacaaaaattccagcccaagcgcattttgatgcaagacgtttagcgatggaataccaccgcgccctcctccacgtcaacgaccgcacagggttaatagttatgacatcgatatttttcctgacagggatattcgcggtatcactccgcttctactccagacgactctcaaaagtcccactaggacttgatgactggtttgctttgtcttctcttgtgggtccatctcgaaccccaaagacttacagcgacggtatactgatatagagatgagcagttcttcgtcctcgccttaaacggaatcttcctctcaggcgtaatacaaggtgcaataaccggtcactctatagttctcaataactggccccagcccagcgcgctcgaagtcctagtccagaaatacaaatatgctttccagacaacagagaagatcgcctttgggctgataaaaacttccattttactgctatggaagcggatgctaagtcccattcgctctttccagctgttgtgctgggttatgattgggattgttgctgcttggagtatatctttcttcttcgcgaccttgtttcaatgcggaacgcactgggactggaattgggcgccgatcgggttttttctaacagagtgtacggatacgctgaatatgctgactgttttttgtgggacggatgtcctgacggattttgtgatcatgttgatgcctgtgccgatcatttggaagttgaagatgtcggtcaagaagaagattggggtcacgagtgtgtttatggttggtatattgtatgttctttctcatctcatccagtagagagttagcgtgagattccagatgctaactttcgttctcacagcacgatcggcgcaggagttgcgaggacatatatctatctcgtgacatcctatgataaagaggataaccttgatttcattgccgacttcacgctgtttatcctgtggtcggaaatcgaggtcaatgtggctatgattgtttgctgcatgccagtctttggacctgttcttggtcaatgtcgtgacactctgtaccgccgttttggtcggtcaaaggatggcgagttcggtctccttgggccttcgacatcggaatcgacaaatgacggcaagacacgcctcgccagtttcagcgcttcgaacagatcctatccacattatgagtagggttgctgcgaagcaaaactcgatgtctctggtggataatgttcgaacataaagttatgctagcgttatactagctaaagccaggaggattcaatattaaagggagatctacgtccggaataatactgtatctcctattactatgttgtacatagtccatgggtctttttggattttagtttaatgattattatgcacgtttttgttaatttcctgactaaagagtaagaccggctgaaatagaagaagcaggcaaccaactatgtagcttcgaacccttccggctgatcggcagaatatcacagtagctatccgacaacaaaccgcttcaggtatatgctctgtaggaaagaagggaatgtataattgactcagtctggtgcagctccgtagcaaataaagcaagcgaagtggcaataaaaaaaagtaaacatcatccttaccagatagcccccaacggcacctcaccgactctttaaatttccttctcacattcttcctcatccatcatcaggcttttaaggggctcagacctcgcataatcgaaaaaatcatttcagcagtcatggctaaccgcttgtttgcatccgtggtagccgttattctggcaatcagcgcaatctactaccaggaacttttggatacgatttatccaagtgacaaaataaaagtggtggacaccacgcgagatatcacttaccttggcagtctatcccctgctggaattgaacatttccaaaacattttctatgcagaggaacccacgggactgcgacgtttcgcagcgccggttccaacgagaccagtgaaagggtctatcatcgacgccacccaggctggtgcctggtgtccacaaggaacgggagatatactcccgttcacgagtagtgtgaccaacatcagcgaaaattgtctgagcttgagaattgcgagaccggcaggaacgcagaaagatgctaagtttccagttgcgctttggattcatggaggtgagtttactgtttgtgaagacatgagcgctgaagacactaatgagtagacaggtggccatgctttaggctcagcttccgatatcctttacgagcctgatggcttggtaaagctggctgctgctgatgggctcccgctggtatatgttggcataaattatcgcctgggctgtaagttatatatcaagagtctttgaaactctgtgccgaggcttacttccggtttagtatttggcttcgcaactagtcgagcattgattgagaggaaagacacaaatgcagggcttcgggatcagcgcgctgctttggagtgtatgtatctcggtgctctttgatcgcgaaatgatcacgaatgctgagaaaccgaacaatcaggggtccgcaataacatcgagtcattcggcggtgaccctaatagaggtatactcacttctatttcccgggttcaagcaccaatatactaatagattttcttctagtgaccgtcattggacaaagcgtcggggctagtgacatcggtctgcagctaacggcctttggaggtgatcaagatgttccatttcagcaagcagtgtaagtgagtcgagccttgaaactgtttcaatgctgattcgcggccttagaatgatgtctggaggtccgggactgaacttcaacagccaaccagacctagttgcaagcaacacggctgctgttgcacagcaagtaggatgtgctagtgacaacgatttgcagacactcgaatgtcttcgaggggttccctttgaacaactaaccaacctatcggttactgcatctcgggcagcccgtccgcctttcggtgaagcttatttttacccaacgatcgacaatgacttcattcaagatagaccctcgcagttgatacgtgcaggaaagttcaccaagggaatacccctgatagcttcctgggtcacaaatgatggcgcttggtatgcgccgccgacaactgcgacggacgacgaagtcctagggagttttggactatggctgcacaaactttcaacatccacgaaagagaaactcctacagctgtatcctctagaggacttcaagcacatgatcaagtcagagcatgaaggtcaaatttcaccgcagtactatcgcgctgcacagctgaaccgcgacatctggttcacttgccctgtccttgactttacatggcagtacgtcaaaaatgggggtgtggcagcctcccaagtgcggctgtacgaattcaacgaaaccagatacgcgccagtctttgattccatgggtgtgtcaatgtggggtgtcgctcatctcagcgatatcccttacctattctacaatgacgacctacgggccggtgcagataactcggacccacagcttgcgttggctcgggattttagccggaagattattcggtttgtgcatggcagttctaaagaggcggacgatgaacttcagtcctggccgcctgctttctcggatgacttttcaaaaggttcattaagcgatatgcctagtcatatctcattgcagctgtttggtggccctcatggatcagtgcctactacatgtagcgaagacattggggctgatattgaggcccttaccgacgcagagaaagcgcttcattgggaaaagttgttcagtcgctgtgcatttctcaatgggcagcaatttagagaggaagccggggtgtgatgaaaacatgttatttggggtgcagactgccaacttactcgcgcagcccccgctacttagggagaatatttaggagtcattttgatttgaagctatcaaaatcacgtcgaattccttccatggtgcttgatgaacacacgattaaataccatgccctggtcggtcataaagaagccaccaagggtaccgtcccgtatatacccactcaaggtccacagccccgacaattgtaaggtctttctcgctttttatcagctcttctatgccagcgagcggataggctcagaataaacagtcgttggcgttggcagacctccaattcggtcaaaactgatctcagaatcaccgctaacctgccatattcgtacaggagatggaccacgacgcggattctgcatatcttcaaaatcttgcattaaagatattataccgtccgagttaatcactctttcaatttatcgtagactgctttctcattccaaaattattcctcccaattattcttttgctgcttgacaatgagtgatgtgacggtctagggaattgagtgtcgatatgagcccgggtcaagtgtgaagcgataaactgtacggcgttcatctcaaagctgcacattggttgcataaattggatgattattcaagtagattatctgaggcgatgagcttaatcaagacttctcttaaagtatgtttacctattactggctgtcgacacttttctctcttgagtcttcgaaggggtatttgctaggtggatagttaaggaaatctatatatggtgtagtgggggaccttgtcttccactacgtattgaccttgcctgtcctctctttattaagtggcttcattacgtaaccctggagtgatggaggatatatgtagaagatagagacagattgaatgtacacacctctacacctctctgagttgacttcttgggcagcgggcctgggttcctttgtatgcacagtcgggtatgaaactgaactgcgagtgctgaatcgacctgtatgccttagagtatacagccttgagcgttcccctctttaatggctaaacaaaataataaaagtatcttcctcgaccaggctgcgattaatgagaggaactagatggtcgtaagtgtcgtccgttgcccgtacactcgttgcacttaaatacattatgcattgaaggaaaggctcttatggatctatgaacccaagttatctatttaaaatgatagtaatgtttccttcgactggtttatccctatattccccttgaatctctccaagagcagatagttcccgttgcagtttttccggaagccatattttcgatagttgaacagactggatttacaaatgcgcgttcaaaaccctttggatatccgcatatgtgacccaacagcgtcgaagttcaaaatgacggagaacaggaaggtggatgttcgacaggaaatcaatcaaaacgggactgtcatctagacacagtgtttcgatatttcgtagtgcctctgccattctgtctcggagactacgatgacagacccttatctgagcgtagaacacagatatctggaaacatctaatcacaataccgttctctttggccacaaccatagcgtcgatgattgtttcgaggtgtgtcagaaatgagtagtccaatcatcaaagactcgaggtgcgaaccagagaaatgtgacccaaggggacttagcaggcagcatacattgctcctgtccagtctacagtcccctacgcacccaggatgggtgctctacgcaccatgacaggtaccatacttcaggcatcagcggggtcgtgacagttaataaaggtgtggtattcctaggttttattcctatagaaaggtttaacgtttgtaggctctcgcggtatataaatataatatttttctattacttatagtgacgggaaaatggtggtaaggcgaatgtatatgtggcagaaaaatctcaataaaatctctaactctctaaaatgacaaatgtccaggaaaaatgacaatcttgtgaacaacttagtaatcaaagacaaacaaaacaaaatgaaaggatgttttcggccgaaaaccgtggacttggtttttcggcggaaaaaacaaatgcgcctgtcacgtgatccatccgtaacaaggatgaaacattacagtatccagcacagattccgacagagaggaatctattgtcctcttgctatgcttcatgatattgttgcatatgcaaggttttagacgaccaaagcccccatttctgcgagtcttctagggtctggcccttcccccggttggtacgtagtagaggacccaacaccgtcttggttgaaactcaagccgctggtccccggaagttgggtagttgcaaggcctgccggattgcacatctccatccgcagctgcatgatccatcgtttgagtgatatattcgctctcccagcatcgaaatagaaatctatcaaggatgactgacccctggtaggatcggaacagatctctggccagttgatcgaacgccgcgcatttgaatccggctgtgcatccggctgcccgcgttctatatataggtcatcttgcaaaatgatctctcttccacggtaaccaagactagacaattggacaaactgcagcttggggctatctgccaacaattcgaagcttcgcttccagagttcctggatcttattgataacttcgagagatagcgaagaaccccaactactcctctcttctgtgagggggcctggatcttgtgctccgattatcgcatctgtcaagctgacattcttcatactcagtcgccttaaggttggcgctgctgtctgaagaaagcgcttgagattccccactgtcagctcaatggaatgaagatgaagttcttctagctgggaaaaccggatattctgggagagatcctgaaaatagagaggagacaattcttccaagggactccattgagcgaaggtcagaacctttaatttgggtgcgactgtgaccagtatactaagaagatgtttgaaggcgtcttcatcgaatgtatcgttttcgttatctttaatacgaatgcacatatgtagagtcgtaagatcggtcaagagcgatagcagtgattgatactgtgactctgacagttttatagaccccaacttcatgccacatgcgatattgccgcacgtatggagggcgcggaccttgtggctagatttgattatagccttgaccatttgtgaaaatgctaaggccagaggcatagataacatcttccgctggaaacttgtaaatgttaaatgaacacttatatcatcgttgttgaactggttcttcagttcacgtaagccaaggcagcgaaatgaacgatagtttgcttccaggagaaattcaatggggtaacaccgtaagccgactgtggtggcgttttcgaggcgcggtaggcatttttcaagaaccgcagtaagttccgagtcgagaatagcacgatgttcttctagtgcagcttgataagaggtgaatagagcgtcaagctcagccttagcctcagttttattgaatggtggttcttccttttcaccgcgcattattctgaagatgcttctctgttgccggagcgccaatcccggacttctgaaacgttccttattcttttctggccacccctcgaacaagtttgggatgatccgaatttctcgaaccgagcctcgtaaggtttcactttctgcaatatcctccagattgtcaaggctttcacgggtgagaagaagtgataaaattttgaagtagcgcgttgcataggctagcttagttgttaaagttatagactaggtactcggcttaccgagaacggtagtctgtaggtaactttgtgttcaaccgaagacacaatatatagagctgctatcgaatcaaattgtaaggcaaattatagttttattacaataacccagccattgttaccaaggaatacagttgaagtagcgcgttgcataagcttccagtgtactgccatgtatttggtggcaagtgattctgagcgcaccccactcctgaggctccagatattcacaaatatgagacaatatctctggaggcaggattgtgatagacattttgtatgaatagtcacgtgaatggttagggatggggttggaaagtggaagagataattagaggaggtggcggcgtttgcagatttgaaggtagcgggagggtagcggcgggtaggtagaaggtagcagccctaatcttaggccccgtggtagacttctattcatatatttttggaaatgaagctaaacgagacatgagagcacttaatgtatctatctgacgctattactatctaggggcagagatcacccgacccaatggtaacgatgagatataagccatcttaccatcccacccacggctagtctattgttctgagctatctatagccctctatcgcacttaggctgatacatacgaccatagggtgtggaaaacagggcttcccgtccgctcagccgtacttannnnnnnnnnnnnnnnnnnnnnnnnnnnnnnnnnnnnnnnnnnnnnnnnnnnnnnnnnnnnnnnnnnnnnnnnnnnnnnnnnnnnnnnnnnnnnnnnnnnnnnnnnnnnnnnnnnnnnnnnnnnnnnnnnnnnnnnnnnnnnnnnnnnnnnnnnnnnnnnnnnnnnnnnnnnnnnnnnnnnnnnnnnnnnnnnnnnnnnnnnnnnnnnnnnnnnnnnnnnnnnnnnnnnnnnnnnnnnnnnnnnnnnnnnnnnnnnnnnnnnnnnnnnnnnnnnnnnnnnnnnnnnnnnnnnnnnnnnnnnnnnnnnnnnnnnnnnnnnnnnnnnnnnnnnnnnnnnnnnnnnnnnnnnnnnnnnnnnnnnnnnnnnnnnnnnnnnnnnnnnnnnnnnnnnnnnnnnnnnnnnnnnnnnnnnnnnnnnnnnnnnnnnnnnnnnnnnnnnnnnnnnnnnnnnnnnnnnnnnnnnnnnnnnnnnnnnnnnnnnnnnnnnnnnnnnnnnnnnnnnnnnnnnnnnnnnnnnnnnnnnnnnnnnnnnnnnnnnnnnnnnnnnnnnnnnnnnnnnnnnnnnnnnnnnnnnnnnnnnnnnnnnnnnnnnnnnnnnnnnnnnnnnnnnnnnnnnnnnnnnnnnnnnnnnnnnnnnnncgccggtgagttagtagttgggtgggtgaccaccagcgaatcctcactgttgtatgttttttatttttatttttaatattcgttcggaagccaaacgctttgcttcaccggctcttcacgccgatcaaatcaacacaaggcgctctggactatcctagacaatgcgtgtgacggaaggtcatcattgttcttgcgagctggtcatcattgtcacgattggcacttgcggaactcgttccttcccgtccgagagaacacgtttgcacaagcagtcgtaccttccttccagaataagcgaggatagggatttgcccccaaaggagtataaagaccccattgttgcttcacgtttgttttgttttctttttcttcttcatacttgatattcagttagaaatgcacttcttctattagaaagagcctggcacataacaatcatcaactgtccactagcccttttttgatgccactccagagaaatgtactttcccctggacaaacccaataatctattgagaattaggatataaaagaaaagctcgccatatttgggcgaatagaattgaatactcacaaggcaaccgaggctccagatatcaaccttcttatcctaatgggtaccgattgtgaattctggtgctcgtaaagctggagattgaatcgtatccgatgggtgattgtctgaacaagaagctaaaaccattgtaattatcgcccacaaagatgataagactagttatatatacaattaccgaagtcaactattctgatatgcggctcacgtatctccgagatgagcggcgtcctgatgacctcccggagtggccttgtaatactatacttattattgacccgtataggaacttcagatagatatttctcaatagtttgttccggattttctagctcgagtagtatattcgtaggtgtgatgtgccaggtctgaaagagtgcattgaatacagaataactaagatagagagaggaaggaagcaagttgtaaagtgggagacagctagttcttatagctgtgtcctgaccgttttgccaacaatgcaaacttcctatctagcaaacaatctagctaagaaaactagtaaataagcaatgtaaacgtcgaatacaaagcaaatatgctgtccattcggcccttcatgtttgaaatgatccagaaggggtaatacgtagtgccgacctccatggttgcttttcccagagatatcggatgatttctcgaggatttatcgctcaaaaatgtcgtgcgagctaccgtggcaatccgctattagtattttgagagccacatacctctgaacccttcagtacttggtaagctgtatatttaataaatatggaaaaccatactcacttggattccctagctaaccaaacggtagaatattgtccgtagcctagtttcctcaccactttgtatgtgccagagttgaaagtatctccaagcgaaacgggatggaagcctccagtagaatgaaagtctgcctcttctgttgtttgtttcactggatggagagatcttgatattggagaaacatattcaaaaacttttgcgagccaagcttgagaaattactcaagccaaagctttattgaatgcagtaatcatcttgagatgttatttgcaggtcttgtgtttttggaacctttggaacgctcgtcggacaaattatgaatgatcaaggtcaggaggtctagaaattaggtatgattttctagttcttattgtgccgcaccggccgtattagactgcagtgatacagatatttgcgaattaattggttgaattacgattctcactagcactagcggccaaattttcactacacattgtatttgagggccatagataagaattagttttgtcgtagtggtccgatccctcgcctataacggatcctcccataaatacatcgaatggtcatgcctcgttaagcttgatttttaaaatgttattatggtccacaacggggtctgtgttattgttacaccgaacaaaaatagagaaaaacatacaacagtgaggattcgctggtggtcacccacccaactactaactcaccggcgnnnnnnnnnnnnnnnnnnnnnnnnnnnnnnnnnnnnnnnnnnnnnnnnnnnnnnnnnnnnnnnnnnnnnnnnnnnnnnnnnnnnnnnnnnnnnnnnnnnnnnnnnnnnnnnnnnnnnnnnnnnnnnnnnnnnnnnnnnnnnnnnnnnnnnnnnnnnnnnnnnnnnnnnnnnnnnnnnnnnnnnnnnnnnnnnnnnnnnnnnnnnnnnnnnnnnnnnnnnnnnnnnnnnnnnnnnnnnnnnnnnnnnnnnnnnnnnnnnnnnnnnnnnnnnnnnnnnnnnnnnnnnnnnnnnnnnnnnnnnnnnnnnnnnnnnnnnnnnnnnnnnnnnnnnnnnnnnnnnnnnnnnnnnnnnnnnnnnnnnnnnnnnnnnnnnnnnnnnnnnnnnnnnnnnnnnnnnnnnnnnnnnnnnnnnnnnnnnaagtacggctgagcggacgggaagccctgttttccacaccctatggtcgtatgtatttgttacagcattagagggaatcatatagcaagataattggggttaaaagactgactgcaagaataacagaattggggtgaacaacggcagaatatcattggatcgtgttgtttcccttgaaacgctctgcatcttggcatctacacataactagaactggaatcattatacggagtacacgataggcagtactccttacaagctttttgaaacatattcgaaaatcccatccggcttgggaacagcggacttgacattctggatctctgtccccagacagacaagcacatcaaagagcttctgtggctccaattcgctcctagtgtgttctgccaccaggccgatgaacctcttaagctcatctccaaatcctttctgctctaggccaactacgacatatcgaagctcaggtacatttgccatggatgcggcgtaccactggattatcgctttaacctgtctatttccgccaaaagcgccgcagccctagagtctagtggtgacaaaggagtagggcttccggacattcctgtaacaatgcgaggagaacgaggtgtaggccttcaccaattcccgatatagacaggctagtatcaggtccggaatgctcactccactatgtgcatgaccgctgtctacaaggtccaattccagggcgtccatgaatagcatgacccggtttcgccagtcagcagacgagggtattgctgatttctgctaggcagtattgaccaatagtaattaagtcacccatggcggctggaggcctccataaggcataaaggtggctttgcatgagtctgcagtaatgttgtacaagcacaagatgtctaggacttcgagttggacagggaagaggggaggctggaagtaaatgctagtccgcatatagacaaccgtgtttcaggtcgtcagtgatttcgaatatggctctatcttgttcgtggagataattttcatcaatgtacgcctctctacgacagtatgatttaaatctgtttatgtagtgactgcccaaagagctcttggggtttcgccctatagctgtcttattgtaaaagggactaagttgtgaaaggacctggtataataatcttcctatatgtccaaactggtatataaattgtatattgcgagcatagcgttcttccctataactcactagaagatgccctatccttctcacgcttcccgggtcgattagctgacagtattgactgtgcataacgagggactttagtataccacattctatagtcgtatgtattcaatctagcactagagagaattatagaataaattaaattcaaactcaatatgtttaggtaatatccaaacctcgaatcaattatcgccagaatattggcacccactggtcataatctccttcttttccaaattccaccgcctgcgagtccttccttaatagatagagctccgcctcgtctcgcaatttcctcgcctcgtcgttatcatacgaatcctgaagcagtgcttcggacagcttgaaaagcccccgcgcatgctcaacaggcattatgtcggcatggaacttggtaatctcgagagattcacgcagatgtttgctgcagtgaaaatcaattagactggtcccgaggggaaatacgatagctcagtgtatagatagtccggggacaaattttagaagatgaaggggaaatggggagaggagataaaaagaaggaacgttcacctacacagctgcctccactttcccctgatcaagacataccacccccgttttgtataagcatccggcgttgaaaggatgcaattttgtctggtcccctttaagccacagattatgtgcctcgataaaatttgcttctgccgcctcgaagctatttcttcgacgctcaagcagtcccaagacaaagtatgcgctgtggggacgggtcagcaacgaacatctcttgtaaacacccttgtgtaggcaagcagagacctactaagccagcattgcccagttaagcggtagttcctgcttgaactcggtgattgaaatgtcaagcaattcttgcgccttgtcatattgaccaagatacatcaaacacctggccatattcttcttcgtcaccgtcggccaacaaattcccctcccctccttgacattccaggcaatccatgtatccttcgacttttcaaaccatatcaaggccatctcatgattattggccgtgttataattgtaagccaggttctgctcaaatccgccgagaagtccgcctttcaacggaatttcatgcaatcgcatttcgtaacccttggtgttgagctcaattgcattttgcacctttcccgtgctctcgtacatgctggcttgaagggatagcgtccaagcggcgatatcagtggccttttctttatcctcaagtgcttccacagccagcatattcacttcacacacgtcttcaagatccttgagtgcgttgatctcgtagagatatctggactggtcactatgtgactttcaaatcaatgcaaaatatcagacacgcttacctctgacaatccttaagaagctcacaaaatagcgatgataccctgaaattcttcgagactcgccgctcttccttgaacttatccacaagactgagaacgtgttgaaggcaacgattgcacccagtccactctagatatagttggttctgattagctccatcggactgcttgggaaacgcacgatacacgatcgcggttgcgttggcgaaagctttctgtcgctcatcaagagagaggaaatatctaaattgagtctgcaccatccgatggcaagaaaatacacgagcatctctgtcacgtttgatcaaagcaagggtaaggaggggctctgttgcctccgagaaactgcgctccaattaggttgagggtgcttccaagatagggctcctcatacctgaactcgtcggtacaaaactcaagatcttctggcagatcgctatcttcagcaagatcaaagagcagctgtggaattttctcagataccaagaatgacgcaattcctaagaatacccggctatccttccccagagtggcaaatgagagatcccacacagcctgtagctcagattggtgagcccgttttgggttcttcaaatagatttgcatgaattcagcaatagaccacgatcggcgatgaatcaatccggccatgtgcgagatggccaatgcatgaccactcagtttctgggaaagttcaattgccgaatcaccctccacttggatgtcactacctatattgcgtttcaacaggaatagcagaaactcggagcccattttcgcgtcccatgaggttatttccagaccagaagtggcaggctcgtatgccaaagaatggttgcgggtggtgataattgcctttccatgactggcctccggccagtatggcatcaatagatcggcagactcgacattgtcgtagaccactagccatctacagtctttctcatgtaatcaataagcaccaatagaaaacccttatagatgctctcgaggagtgacttaccagtcgtctggaaccaattctggacaaggatcaaattctcgttgtgcaagttgggttgcgcccccggtaacttcaagcgcattgcaatatctgtgaagctctgtcgtaaagaggctgtcttctcgccatagacccaaaacacagcttcgtattcgttcctctcaatcttttgctcaatatatcgtgctgcaatcgagctcttgccaatcccacctagaccaaagatagcaatggattggaaagatgtgtttgatcccacccgacctaagacctgatcgattttctcaaaagtctcgactctgtcgaaaaatcggggcgtctttctgcttggcagtatcatgcaacgaaattgctgcgcaagtgttgctgggtccggggagctgtggtgatctggacctgggagacgtgccgcaatcaacttttcgactcgcgcaacagtttcaatgagctcctggtttgtagaggtaaatcggcgctgaagcagcagccatgggtcattttgtcggtcacgactatcctcgtctcgtctatctgcgttatcggtattagtttgcctgtacagtagctctttcctttttgctacaactcaccatgacgcattacctcttcctcgccacgcatagacttcaccgcgctagtgaaaaattccactagctgaatctgaatatcaaagcatgcttcttttatttgttccggattgtccctcagcgcgacatagtagcctgtgaaggcctctgctttatatccaagagacttcaacatccgtggaattttggagagcgcttgcggatcttgagtagtaagctatcgcgttgtgagcggaattgaccgttgaagaatcaagcctaacggctaaatgctcacctggagtaggacgccgatgatgccccaaaagaaatcagcttggagaattggggccaactgagtctcgaatatttgtgtaaacttatagaggtggccaagcgttggtttgatcaaagcaatctcatatggaaccactacgccagcgcctgtgtctgccgatccccacacatatttctgcatcgaatcccaggaggtgatcgattttacctgcctcaagtcatctggctccagtgatttctcgcactgctcgatggttgctttccattgacggccgaagaagctttctctagcgtgaaatggtcagctaccaaacattggtatgctctccggttcgtgttggcaacctacaggtccgaggagtccatcgcgatgtggaggcagtagaaaagcggccgtaaagtggcaggatagtgtagcagaaagtaaatttcaagtgcgaggctcgttacttggtatgaaatggaaggaagggttctcgcagctagctgcatctgtaacagggcgtaacaaacattctgtgtgtatttccaaagccctttgtggaacagtgcatatgtggcgtttgttccagctaccaattaaaatcaaggtcaacgagaacgaaacataggctccaacagcaattatatcagttcttcgcaaaattgttagaacttccgaggatatcaatacaagaaatgaagctcttggaattagggctttgaagggtacgtagcaagccgatgattgaagtatcacgagcgttgggcgatttactctgagacatcaacggggcctggcccccgcagatccaaattatgcgggttttatcccgctttacgaagatcactctggcgatcacatagcatcttcagcaaatcaacaacactcattttgtagccattggcagtttacatgtacggtattggtattaaccccgaggcaccccgcgtcgaataaatagccatccatgctttcctggctgaatccgcccgggtttcttttatgtagtcttcctgtgaccacgcaccgctacttattctttgttttctcatccactatactatgctcacgacttgtcgcttataccatatagccatggtcaaaccagtgaaggttcaatacatcggatgggaggatgactttcgctacgccgaagagaaatctcggatcacagagcatattcaaaagattgcagaagataacggattttcccatgccttggtacagtgagtacatcctgaggtttacctgcgcaaacgaagcggatagctaatggaccttgggcaacatagagacatgatcatgagataccgctacagatcccaaggaccatggatagatgtgcatttcaagcgtgagcaatgggtcacaaacggagtagggaaatacgtgtttacaagattatggtttaatgaggatggggacctcgacaaggatccggagttcttcgaggtagaaaattgatatctggaataacctgagctactcggagactttcaatggatatataactggcctgcaatgtttcgtaaacataattaccggttagtagttacccagcgcactaggatttttcaataatgcgggtcaaagtacactggctggcggtcgactcccaaagtggaaaactggcgtaagccagtacccctcaccagctgcttcccaacctctagctaaccatccgacagattatgaagatacgtttttatcacttcaaaccgtcaagttaatgtgttggcctttttcacacaactcctatggcttcacgaatctacgcgccttccccttcgacattcgccgaggatccggatcgatatcgcgagaatggacttcatcctctcaccattggtgatatcctcaaattcggtagataccgaatagttcataagctgggctcaggaagctttgccaccgtctggctcggcagggacacatcagagaacaaatatgtctctctgaagatcttgtctgccgacacccctcttgactgtaaagagcttcggattttacaggagataactgaatctgaattaaaccacaaaggacgagagtttgttgttcagcttctcgaccattttaccatcgagggccccaacggccggcatctgtgcgttgtgacccctgtagccggagaccgtttggcgagaaagcccgggttgccttacaactccttggagtggcctcgaatcattggacttcagattgcagaagccttgggttatcttcacgtcttgggcattgcgcatggaggtcagtcttaatcgcattcaggtgcccgtggacaatgtttaacttcgaaacagattgttacacatccaatattctctcccaggttctcccatttgacgattggaccgaagaagagctctatgcttgcctaggacagcccgttaaacatcaagtacgtcgcttggatgggatgccaagggaagacaatgcccccgagtacacagtcgacccctgtgatataacagcactagaagctcgtctgtccacagaccgaattctcctcatcgacttcggagctgctttctatcaccacgaaagccctgagcagatcttcactccagctccattcgcatcccccgagattcttttcggcggcgagctcacgttcgcagtcgataattgggcatttgggtgccttctgtacgagctttgtgccgaccgcagtcttattaaattacttttcggatggaacaacgatgcgatgaaggaccaggtggctatgcttgggaagcctcctgatgctctctggcaaaactgggagggtaaggacaagtactttcaccccgatggaacaccaaaagaagcccacgataggcgtctgaaggtctacccactctccctgaagcaaagagtgcgaaacctggagaagcccctcagcgaacgaggctacggaacgggagacgaagcgccacttccaccagatctccagaacttgtttgaccttctcaatggtgtcataacttacgacgccaggtcccgcatgtcattcgaaggagtacaggctcatcctttcttcagaggcgttaatatcccggggtgttgacgatagtttatcgtcccagaagataagtgcacatttggttttgcatagccttttggagccatggtagcgatgagatattgagatggccggatcctggcaattgtgttttggtcatttttcctatcttctgtttctttgtctcggatttatctcgattctctaagaacatgagcatagctgtgtatgattgaatagcccgccactactgaattcactcatggtagaagcaaatccgtctttttcaacatataattttcatcggtacgaaccaagtcgttgacatcgactcaatacgttttctgacaacccactaaccagtcaccaggtgtaagtcagacacgatcattcgactggagctaacggaagaggacggaaataacactatattttgacagcctagctccccttgaggggaaattgattggagaatacgtctaaaatagcccgaagtgagattataacactgcaagcaacgcatgcctgaaaccgtggacacacgcgccaccaccaccaaccttggcgtgcaggaacataatattatgcgcaaatggtattcgggatacgccattgaagaggcatgttaacacgtaaagattcaaaaacggaccgacgctcgactaagaatataccgaaccccgctagaactgtccggggtcgaaacccgcgactttggcatacccaactggtgatttgcgcattggaaaggttgtacgggccacctagactcggcgcgtgcagataacaataacttggcgcataaattaaatgaatggtggaattgtaatatccgactttatctgctgatactcagctcaacgtttaccgaaaccccaaagcggctgcgtgcgttgagctgagtagtttgttacgcgtattcgatgcaccttccgacgagtaatatcgagcgattcatcccgtgattaacttgcagctagaatgggagctgtaggtctcagttgtggtacaatttcaaaaattggttattttttggtcatgtacctttcgcatacggatgtgatctgaaaagatacaagttctttacggttgggagcaggtaatgtatagcataaacaagtatcaatcttcattaaaataactctcaataatacctctcgcagtcgccatcatagaactgccgaggactacccttcgtaactcctgttgatctgatgcccccgattttgaaagtctgtttctcgtcttgacgagataaatgagctcccactatcgagtaacataaagcataaatcacttcctagtaagggtttgttagctgcgtacctttgcttgctattcgtaatactcacttgacagaccgcgagggcttaggcttctccttcgaaaagtcaacatcggctctaggatcgagcgcaatggttccgtgttgactcatgccgtacttggcgggattcatgccggcgtcaacatcatctttcatggtaatagcttctcccttaggagttgagcccatcaaggccgtataccactcccgccaaggctggacgaggtctgagttgatattttccgcgggcatgttgctggtctgtgattgggatttttctttgaagtgggaaaatttaggagttgagcttggaggttcggcaatgaattgggatatgtggtactatataactgttttatcggcaatgggaaattttgggctcgcagctttcaagagaccgcgacccctcttctagtctacgcaatgacgggtattccagtagttctcactaacaagcagtggaacacggtggtcaagtggttatcttgctcaacgtggaggaataccatttgacaaagatccctgtaggggcttacagggatggaagcagctacgtggaccttcggattgggctggtcctttgaaagagatgcacatgcaatcggttacagtctagtattgcctatacggcagttggtattatctgtagaaaatcccttatatacctcacgcacttccaccaagcaataagacccgcccattaactttgcacacagattataccatcaattagttatgccaatatggaaactacgatctcctatttagctcaagaccccattctcgacatcgaaaagccgttcgataccgacgtcccggttgatcacatccccggcgcacgcgcctcgaaccatcgtaacgatgagagagatgtgaaggtgtatccaatcactgatcttagcgaatgggacctcgagaaacatggtttctgcttcatcagagcaaaaacgggactgaatgctgaggatgcattgacaagaaagagggaggtacagaaaggttactggtatgagattgaagcgatcttgcacgaggctttcccacagtactcgagaattgagtgctatgattgcacggtattgtgttattctcagttctacactttgaattgtatctcacgcaatctgatgagatataggttagaaagagggacccggatttccctaccaatatcaggatctataccaaagtcgagcagccagcacgaagaccgcacagtgattgttcgcccaggggcgcgcacatgaatcttgagcgtgcgttcccaggacaggaaagcttttgggagggcaaggacttcgatattttgaagtaaaatgacccctgtcaagctacttacttgatatggactaaagtattcttcctagcgtttggcgaccactccgaggcccaaataatgactggcctctggcgatgtgtgactggacgactatcgacccttcaattgacgttcgcatcaacgatgccatcagacgtgatcgggttgatgagaatgccattctgcatttcaatgagaaccataaatggtatttcatgaaggatcagtcggtggaggacttgattgtctttcgtaacgctgattcctttgggaagcgtgctcgtaagcttgattcttacctatctggggagacatgtgatgaaatttatactgacgtctctgaagaaggattccactgttcggttttgaatccggagacgaatgggcagctcagggagagcgttgaagtcaggtgtgtagcatttcgctagggttgtggtgtacacggagtgttttcgtagcatagtatagcttcatgatgcaatcaattccagctgacttatcgcacaaagcgtcgagatgattcttcgtatgaaatgggaatcaaccaacaccattacctgattagtctgattgatttggctagtgaactgatccaaaaaaaaatgtaacgtgtactgttgcggcttagagtgagtccccatctggattctgcgggtgttgtatatttgcccgtaattgcccgtaattgcccgtaaggttcagaatacaaattttgacagaatcatttagttacaaggcataagcccttttaaaccttctgcaaattgggcttgggctatgcaattccctctttcagccgtcgactccagcactaagatgtttgaaagcggtacagagccaatcacccataccgaggcgagataagaattaattaccttcttggttaaggcttgcgttaccgattcaacgcctagagtcatttgactttttcggggtttcaaattgcatgggtgatggctcgttctgcagtccctgcatgcccggttgccagctcacgccccctcctgcctgaaaattcagtaccgccttctaaattgggtgcgacattggattttaccatcatttctgccactatagagtttcctgccaatattctgcccacgtctggtttacatagtaaaaaacattcattttgatcagaaaaaaaacgaacggagttatattctgcctgattcctatgatctaacccctgactatgaagcagtcattaatgaagcagtagttgataaagcatttgttgatgacgcagttggcgatgaagcagttgatgtgatagaagtgacataattttgttagttgtttacatactactccgtacaaactgcaggtatcgacggagtatgtactccgtactgtctcgctactcaaggttgtgtagggagtttgacactaaagcggtgtagatagcggtaagtaggagcaggtgtcaaagtatgatctattcctaaatagaaaggcggtattgaactttcagacccgtctaatattagtatctagtttctcgcgcatggtgccctagaatgcactaaaatccggtcacggcgttactggcattggattggatcttccgcagttttgcaatccgaggatcaacttgaactagccttggctataccgcagcagtttatgttggagctgaataatatgtctgcactattgcagcagcaagctggaaaacactcaaaagaattgaaatgccacccacccataacacagcccaaaatgtgtaccactgcaatggatttctccgatcccgccacaaatctctaattctactcggttgctgcttcagattgtacagctgcaccgccaagagacgagggccgaaatgcgggaagtcgtcccgggcggagtaggtatctgactcgatgagagaattatagagatcgatgttggaggtgggaaatagctcgactgggatcctagacttcgtgaagcggcggaggaagcgggactgcgtgaccgaggcgctgcagatggcgagaaggaatgggtcaatttccccggaaagtttcttggtttgctcgagtagttctaatgcaatttggcgggagtgtgaggactggccgaatagaagacggtatgagagtaacacttcacggtggagagaagatgcgtcgttggctaagctgtctgtataaaaattggatggaagaagctcagacgaaaccctggcagaaggttagacaattcgtgcaaatacatttttgagggcatgaaaagagctcactgatagagaacattgagttgctgtgtctgtaaaatgctgctcgcgcaaaatgttggcaaacagaacacggaaagtgtccgggattgtcgatcaaaagcaagatgagatgccagattctcaacccatttcaccctcacccgacctatcgtatatagagagtaacagttgacacttgattcgtaaagtatatctgtcgctgtagccccatcgtgtctagtatcttccaacgtacccttaatggcacggaataactttttgattggccttctggcagattgcccgaggggaatctcaccagattcccctggcctgctgccatactttgcgcgtaggaatagagtacgatcatttcccgatgcttcattggcctgaccaagttccaggtctgggtctatcgtcatagatgcccagcatagtactgcaaatattgcaagaagagtgtggtccttctcaagaggactgaatccggccgaatttcctttgatcaaatgatggtaaatcttctccatgctcacagtttcatctgcctgcaggctctggattccccggagcactgcaaggaaccagtgccagccatgaacagcattggatggtttctctcgcttgaggattttccagataatttcgaactcttcgcacagcaggctttcaaacttcctctccaaatggttgcataaaatatgtattcctggccattgttttgcatgtgagattccaagcccaaagagcaactctattgcttcgagatggatatccagggacatgtcttcggtggttgtagctacatgagccttgtattagtttgattttgattccttctagaacactaatctctcttacctggtttaggtttcatcgaaagcatagaaaatgatggctaggagaactgtatttagttgatgggaaccgacagaacacatcacaaatacagatacggcaaagctcacatgtatgatacctgcagggcgccgccatattgccgacaaaaaatctgaaatgtctctttttgcggggggttgtcgaccatcgtgagcttcgagatccgggtcagaaaccatgccgacgagagattggatatgtatggaacttctgacttcgacttcgacattggcccctgagacgcatttcaaaggaggtcaactcaaccctatgaccaagagaaagaagacgagtctgagtaagcaaagcaataccccccaagcgttgctaaccggattgagcgaggatacgatgtggttgtctcggacttcttcacccagttgcgtttgttatgcatgacgtggagtgatagcgcttaaaaaataagattacagtagagctgaactcttcttatttctcaatagctttttcgctccacagaaagaagtgaaaagctaagttgccactcgttatgcctccagcaggcaaaaattgctgctcttttatttcgacgtaggaaagacggccatcagcctgggaaggttccattgctgtatcgaccagatcttcatgtttcgaaagactcacgggtttatttatcggcggtttaggcgggttcatcactttcaaagtatccgagaagaggtaatgggcgggtatgcatggcttgtctcttgacttgtaaccacataaacttcatagaaaaacacgatacggtattttccatgcaaaagagaggggcggtaatgagctccgattggccacgtactagcgtggcgcgaggcgatcacacctgaagtcccacatcgggttcgattggaccaagggcttgataccctgctgcatccagtcagcgctagtcctgtgaccagcggccttcgaatttatgtttcaagtagtacataattgaaaaactagtggcattaaaatggcgtttttccaccttcccactgccgtcggagtcggccctccggaaccgcgaattgggttttttgacaggtttctcttgggagattcggtgacgatagtgtcagcttctcggttttattttaggcataatcaatgattgagaataaagaaagaaattgctcggtagaaaattctaccaatgtgtcctatagcatgtatgtgttctgtaatttcagtcaaagaatgtgagggcctgttgggtagcgcagccccaatccccaatccctgccaactacgctgactgagctcccctccccatcgcttttacggcgctacgtcttttggagcacgaatcagtctacccctcctccacattgaacatcgctccacgatagctaccttgcctttttccaagccttgaggtgaactgttttaactccccctgaacctcttatcattcataacctccctcaccgctgcatcaagtaccatgtccgttccccaaagctcctttaccccgcctcctggcacaccaatccatcagctagccataaagccgattttcgatgctcttgagccgcgggagaagttctatgctcactattgtgcaagggcagcatggcatgggagcagaattatcatgcggcaggtatcgccagaaagccctggcatcttcgacttcatcatggacctctatcatgcttgcgatggaaaatgggacaccttagtcacccaaagcaatatcacatccgaagagctcgaaagatttctggagtatgccgcaatgtttctctgcaacttaggaaactactatgtaagttcggcgagatctttctagcaacagcactgactgtgtaatcagggcgaaggagaccaaaagttcgtcccaaatctgacagccgaagcactgcaaaggatcgcaagcatctcccaaaagacgaaggaaggtctagacaaaatcatcggtccgctattggcagtcccgccattcaaccttggatatcccagcaagagcgcacagtcaggttattacactggcactgaactcatgtcacagaaggagattgctcgagtgtcggaggcaatgattgaacattccattgggccagagaatacccgagttcgaaagctaattcaggatggaaaacctatatatcatttgcttcaagcttccgcggagactggtgttcccgccaatggtctacacgaactggcaaatgacatattcatcgttagaggcgatcactcggtggaaatgtcgaacatctgctcggatctggcgagagcaaaagaatacgtcagcaacagcaggcaaacccggttcttggagctctacatcgaatcctttagtactggtagcctcgaagcttaccaggagtcacaaaaggcgtgggtaatggatgtgtctgcaagagtagagaatatgattggtttcatcgagagttatcgtgatccggctgggatcaggtcggagtgggaagctatgatcggaatttccgatccgggcgaaacattgaaattgaaacgctttgttgagagttcaacttctatcattcgacaactcccatgggcagtcgatggtgtcaacgatgggaaaggcccgtttgagaagagtctgtttgaagctcctgactttaccagcgtccacggtgagataaagattgtctcctcggcaagttaaaccatatactaattcccttagcgcttgctgtatgcggcagtgtcgtcttcgaagccgccaatcttcccaatgtaagctctggaaggggatttctggattgaatgaagctgacaatggagttagtacgaatatattcgagaaaattatggttttaagaatattgttctcgcaaatcgtctcagtgctaacaataaccccaatctaccagtgccttgggtcgatccatcagagttagagcacttccgcaagagcacacatattgtcagatttctcaccaccgctatccatgaactggtgggccatggaactggtatactcctcagcgaaaccgctccgggcatctacaactttgaccagcagaacccgccgatcagtccactgaacgggaaagccgtgacttcgcactatttacctggccaaacttggaatagcgtttttgaaaatttggcaggaacagtggaggaatgtcgtgccattctagtctcggaatatctcatggacaacaaggatttgttgtgtattttcgggtacaccaataccagtgaaatcacggctgacgaccgtaagtgctaccacgaccgtgaatttagcttgcttactaacccaattttagtcctttataccacctatctcaacattggtgtcgatgggcttcaggctctcgaacattataactttgaaaatcaggcttgggggcaagtccaccaccaggtatgtattcctaccttttcatgctctagacttattaaaactaagctgctacctaggctcacttctccatcctgaaacaccttctccaagatggcggcggcgttatccaaatctcccatgaccccaataactccactctcaccgtccatatcgaccgggacaaaatcatctctcacggcaaaccctctttaggccgctacctctgtcgtctacatatatggcggtgtactgccgatatttcctcttgtaaggaattctatgagcccatgtgtgctgttgaggggatatacgaacagtggcgacagattgtgtgctcgaagccaaggccaagatggaaattcactcaacccaatacgtttgttgatggagaaaccgtggaggttaaactgtatgaggagaataacaagggaatcattcaatcatgggctgagagagggatttgaaggcatcaagattggagtgcatggcaaatagggtgtctttcctcaaattcctgaaatggatattctgccttccccgcttttaatatttccggcccgccccgtcgtgccttccgcgtatcagtcccactcaacgatacttttctaaaattaggtaccttttgtgtggtagtatacccatacaaaaggtacttataccccatattatgttctcaaccctctggctagttaaaggagaaataagggtttaaatcaacaacaaatcatagttaaattaattggctaataaaagaaatttcaaatatcttatatagagaagtaaagaccatatttatgaaagagatatatgtagagacatcaacgttctaccacttggagaatactcaatatttcttcctaatatgttaatagtaaataaaatggacctcctttagactatatattccctactatattttttgtaagtattcccagaagtgacaaaatctctgtttcatgttcatgtaccttttgtatgggtataccatataaaagacacctaaaaagaaaaatctcgtttcgtgagaatctctcgttatgtgggacagacccatacctggtacagttatgggggtggtaagacggctaatatccatctcttgtacttggtatctggaaggagatgcactacgtattacacatgtgttccctctttgcttgttgtaatacattttgatggatatattcttcgttcttcctagctacatgattatctccgcggtcaattctccattttgattaaccatgggaaatcatacccaaatgacattccctgaatcaaacccattggcctcattgctccatggaagtatataacttcgctggttactcacaaccctaatccccctctccttaaactccgttgagtaatgtgtatgcccgaagacccagtttttcacaccattccacggctgcgataataagtctgtggcaaatgcagcactccaaggattcttcgcatgctgtggactcgatgtacggtgcatagcgggtgcatgatgtgttgcgaccagaatcgaccgtttcgataattccgtaggatttgttttgtggttattataaatcgattggacctcattgcgtagccaattcaagtcggactcatgcgccgcattatgctcgtcgaccgtccaatccttgattttctggaaatcctggattttgtaatggacaatatctctggagttttcgggaatattagaccaaaaagtaaatcccagtacggtgacatgggagtctgggatgtcatatcgtcgttggtggagtaaaatgagtcgtccatttaaagatggctcttgttcaagtcgcctcactgtttcgaaagccaactcaaaggatccgccatagaactcatgattgccgaggataactcaaatttctccacttgcctttggaggaaacgaaggtattgatcgtagtctgctaaacgcccaatacccccggccagcagcagatatttggagacaactggcacgtcaaatgatgtgtattgctggttcacttccaagtgaagatcagaaagagtatgaatggagacagacggctggctgaacaattttcggataaattgggccatcatagccttgaacaggctccagaggctgagagaaaagtacggagtaaaacatcaggtgggtttggtgggtagtcatgtgactggcaagtggatcagctgatctctctagcgttatctatccaaacttccagcaccctggagatgtccagcatgggctcctagggtaggagatctctctaccctataatcgtctgcagtcctccatcttgtacatacgatcatagggtgtggaaaatagggcttcccgtccgctcagccgtactcaagccacacgccggtgagttagtagttgggtgggtgaccaccagcgaatcctcactgttgtatgttttttgtctttttttgttcagtttagtaatagtagcatagttatccatctagtcccgctgtggacctctattaataatctttttagaaatgaagcttgacgagacataagcacttgacgtgtatatctgacgctatgaccatctatgcagaggtcacctgacctgatggagataagccggcccacggataattctcggctattctatcttcccagggtcctatcatgtgatccccatctccccaccttttcgactatgtagtcccaacaacaccttatgaccaagaacaagatccccgtgggcctccggctcctctagtggggaattcaatcaacaaattgcgctctatcacatttagtttgggagtgctccagggagttgagaaatgtcttcttaatttaccttactgcctcggaaacaagaacaacaagcagctattaatggatgacggttggattcgctttatcatcaatgcatgtacaacacggacattagcgcatgcagccatgaagcttcatattgatttcggtacgttataacatcaagaattaagtggaccctggaccctggtaatagcagaatttccctcgcaatatttcctccctcgcaatatttcctccctcccaatatttcctggttgttcgtgtaggcataacagtgctcaacaaaggcgagagaactacatcaagcctccataagtttgcccatcttcactgcgcttctcatccttcgtgaagtatttcttgaggcgttcctcgtctttcttcagctgggaacgcagcccgccctcgtttgcgtgatgcttgtcctgggcggcatggtcctcgccgaccttatgtttgtcctgggcggcatggtcatggtcttcaccgtgaggcttgtccttggtagcctggttctcgcttccatgcttgtggtgatcatggtggtggtggcggtcgaggatcttctcgaagaaggaatccttgtgttcgagcttcggggcgtctacattgaacctcgggttagaatctgggggttagaaggcttaagtaaaaagtcacgaaccttcagtcatcgtgggcaaatttgatgaaaaatatatagtgtagaattctggaaattgtatcttatttggggtttaaaaatgctccgctaggtgatgtcaaagactctttcatctactatatatacatctcttgaacgtacgatacttcgtgaactgtcggaatgaaccttggtaatgacgtgttgatcgatctctaatcggccaatcagagggcctcgggaggtatcgggtatagagtcgataggtataagcagtactgtcatagataattgatctacttactccggcacgagtcaaccgatactagcaaatttgaagacaaaactacgtagtgcctagataaccccataaaaattcattgatcagcatagtcaaatggcattctatctgcgatataaatgactgttttcaaatcaattgtatgtgagaatcagtgtccgcaattcgaaatcaacacaacgcatgggataatgtgactatgcaacaaagtattgtgcaaatagatagcggaaagcattgcctgtagagactgctccgggccgtttcacagcctgatgtgcttctcttccctcttttctcgatactatcaccattttaatccaattctcgttcccgtgcctgctccggtaaaaacgtaaaagttcctccggaacactatatctgcccctagctcacgctggcaagtgatctatcttctgtctgccttccctctatcatgtcgcctattctagctcaatggtgccagggggctttgaggttctagaaagacaaaatgtcagcgcatggctcaagaccaatagaggctaagacttatacttacaaatcatagacgacacgggcaacaccctccaccttgttgcaaatggcgcgcgaaacatcctagggtagacaggtttgtaagtataggaaataatgaaattgggcctttgtgggaagggatggagtgggttgggtccgtggtataggacccacccgcccgccttgcggagagcccgaagtataaccaagacctgactcacctggaggaaggagttactgaagtcaaacacttctgcgctcatgaaatccttggtacgaacagcacggagaatcacaatgtaaccccaaactcgctgatcaccgaatacaccaacactgcggttagtatcgagaccagcaaaggcttgagatatctgtgggagaagagttagtttgcacccgtcttcgcctgtgtgacccgacttacctggtcgtaaaggccggcctccttgatcatgctgatgaagatgtggtcagccttacgggcgatctctactcgctccttggtaacgtcgccgaggatgcgaatggcaatgccaggacccgggaaggggtgtcggttcactagtgactcgtgtatgccgagctgtcggccaatggccctcacttcatccttgaacaaaagtctaagcggctcaataagctgtaacagaagtcccgtcagctttctctgcgttgatgaagagatggaaagtatacttacacgcaagccttgctaaacgggccatgttggttagtaagtaaatcaaacgatactagattagctcgacttacgccgttcatcatccgctaatgctggttagttaagatccttttatattcgggacggtggtattgcttacctcaggcagaccgccaacgttgtggtgagctatttctaatgtcagcttttgttctctcttttgtccgtggggcagtcttctgctcccgagacctcgttgactctcttactcttgatagtggccgaaggcccgcggaagctcaaagattcaatactaaaatgttattagtttggaccaggcaatcagcgcagaatgacttacacgtcaggatatagtgtcccttgcaggaaccattccaccttcccggtgttgggggtgttttctgcctccttctcaatctgcaagtcctgttagctagccaaatagcctgtcagagaaggtcgagcgtaccctaatagcctctttctcgaacagatcgatgacttcaatgtcgttagtaccctgtcaccaacacatcccaaacagcttgaagtacgcacaagttgacccaatgatcttccgcttcttttcggggtcagaaacacccgccagacgacccaggaacagctcgccagcctcgacaactgtgagattaatgccaaggtgttcgccgagcgtggccttgacctcctcgcactcattgagacgcatacatccagtgtcgatgagaatggccttaaagcggtctccgatggcatcacgcatgagggctgctcccacagtgctatccacaccaccgctgacagctccaaggacgagtgctcggtcaccaacaagatcgcggatgcgagcgatctcgagctgagcgaagtcgcccattttccaactcggtttagcgccgcagatatcaacactgaagttgcggaggatctcgcttccgcggggtgtctagatctgaatattagagggagttatagtgtaataccttgggggtgacgaacgtgttcgagctcagggtggaattggacgcctagtcaccttgcattagcatattcccttactgggccacaaaggcagcttgggggaagacaaaccaaagatgggcttctcctcatgggcgatgccggcgtactctgagttcttggtgtccgcaatgatcacgaaaccctattagagtcaataaaagtgcttcggaaatacgaagtcatttcactcacagcaggcaggctaactagcttgtcgaagtgggacatgaacacaggaatttcatcccccaatccagcaaagaggcggtcgacattactattaaccttggtgattttgaggtcggcgtggccatactctgcgaggaaagggtcagaaataattttatatggtgttccgaaggttgcaaacctcgagtttctccgcgagcaacgttcgttgaatcgatccgccatgcgatctcctggcaaccgtagctgggtgatttgtattagtgtcgtaccgatgtcgatgttggaggaaggcataccaaatacccctataccccggtgttagtacaggttcagaaccttgagggatgggcggggaaaacactcacagaataggtacattaaggtcaaaaacagcggggtcaacatctacacatatgagtacaggcaacaggacgttcgggggatgaaaaccttacggggcgagccctcgtcgtagacggaagaaggacctagtatcttagtcagacctcagcacaaaccatgtgttaagagacttcatacctccagagaacacaattcctttgggcttccatgtcagctcagcgatcttggtggtacacggaagcagctcagcgaagacaccgagagcccgaagccgacgtaggataagatggctcgtttgagacttcacaaggggagtcagcatttggcatttgaagagggccaggagccggccagcagtaatgaagctccgttatctgaaacaggccgaaagagaggaaagatggcgctcgagatttacatacgccaaaatcaagaacgaggatagtctagagagtcaattgtcagtcaatccgttctttttgcgtttatgactcaattgcgccggcacggcctagggctgcttgatcgcaagttgctgaaagcgggacaagtgggtttcctggctcgccattgggatatgatggtacgtacgtcaaagttgttgtgaggctcttcggcctcgatagtgggagccattatgatcttggtttcggcagggtatcgaaaggattagcggggtgaagtgagggaaaaaaaaaatatgtttggtataattgtaccgcctccgcggccgcctcctaaataggacaccgccttcaaaatgctctatcgcgggtgaatccacgtgacgctgtacgctcttgaagaatcttttggatgtttggtagcatcttcttttcgaatagcaaagaaaaaaccacggcagactcgaaagcgccctgaaaaaggtggtatctgtcaatctagattgggtcgacttggtgacccactccagaattctcacctatatcacttacactcaccccaagaaaaagaaagaattgtcgcatccaggtcatcgtgacgccagcctgaagttcaattggggtatcttcaccagggtaggtgccgttacccctaggagccacaatgttgccattgctatgtcgtcggatagactagtagaatcggaataacgagcagaattggggtttcaagtgaacaagtaagaagacctgctgttgaaaatcaaatcgttccagaccctataagatgtatatgtgtcttgtcaacagctccatggttattgttttcaaggacgtcatggaacatgagcgctgcttatggcgaattcaatgcacatcaatggatgattgcactatgggatacaggtttctatgtaccaaatagattaaacccggccatacctgagctttattattgatcgaaaagtgatgaggaacaggaaacagacgtaggcaaatgttcgcgaccaaccctacgtgccaaggctgatcaatcctgtccgaggtaaacgccgacgcgataacttccaatgcaagtggagctcggaattttaacggacttttaaatgtcatgacattggtcggtttccccgacacaaaattatgacctgagagatcgtcgacgacattggggctcgggtaaaagccggagaccacagacctatgaaccccgtggggagtcgctccactatgattccactttgtcatctcttcccctttgggaaaggcaaatccaacttcgtgatttctacataaatacctttctaatccctatctaggagacttcattatcagtcaaccttcaacatgaagctcctcttgtcactgtgcctactcggtaccagcttgatgaccggagttgccgcgtcgcgcaaagaagtagtaagtggcacgtctgcggttgcaagcaagaaactcccctcaccaagacgaacgcagcggtcaacacatgaagctccaaaatgtgccaattctgcctccacgctatcccttagcgaccctccttacgacaactatttctactccgactgcaatgtagcggcccaggtagtcgtcactagtccattgccagatagcgacctttctttgatcgcacctcgtttgatcatagcttggcctgctggtgacagtggggcttgcgcatacttcgcgcctcaaaacggggtcaacgggtcattatcactcgagctcatcaattcaaccatcgggaagcccttggcacccatctacaccgcggagctatcaaattcatctaatacctatcccagtgtgggagttcaaggcgtactccggttcaattcgtctgcaacactgaccgtgcctgttctgggcagcatccgctcaatccgtgaattcagcgaaggaagtgtccttaggcctaagattcaggatgcgatcaagtttacttctaatagcgatgggagcgcctcgctccagcgactctggttcgataatgtcaccacaacaagcctccatttccgcccttggaataatggcagcaacagcgacaagggcagcatggtatcggtagatggtcgcaccgtgaaattcgaaacaggcgactatcttttttccgcggaaattaactatcctcagttatcccagaccagtccaaccgcagtgctgaacgaaaattctcaggagctaatctcgtctatgccggatcagacgaaggcgctttcatttatgtcatactcaagtaaggttctcgcaggcgcatggcattacctgacctattttggtcgtgactcaatgattactgcgcttttgttggagcctgttttgagtgttgggaatgcaagtgttatggaggcagtgattggttctgttttggagcgggttgatcgaacagatggaagtgtttgtcatgaggagactattgggtgggttttgtgttgcaatttccaatctggtggttctaagacatttgattggaagatgctcttctatatgatatgcatggctaactacgggatagggactatgcgacctggtctaacttgcaaaataatatcccaagcaacgcaatgggctgcgactacaaaatggtctgttgagtaatcactccagtgctattgtcccatcgggcaatatgaccaaagaggcaaagctaattgagtcttttatcaaacagattgattcggactattttctcccgatccttatgcaacggtattttctgcagaattctgttggtcaacagcgaatcaaaaccttcttcaagtaagaatttctaccctcctgatttataaaggaaatcactaatacttcttctctagtacaccggctggctcggccaatgtggcgaatcggaatttgaccttcggcgatctggctctaataaatgctgagcgaatcatgcgtcttgcgggcccgtttgctcataactctatcaaaaagaacctcattcatctcaaagagggccaagatatcggccaatggagagacagtgaatacggtgagcagaaccctgccttctcgaaaattcccagggtatatttgtaaattggacgctgatttttgacaaaactttgaaataggtatcggtggaggacgtataccctatgatgtaaacacggctctggtcccagcagccctgcgctctatcgcaagtcttgcacagaacaacagcatcttttcgggacgcaagaactggtctaaactcgccaatgcctacgcaactgtatgggaggacaagaccctggaatttttccgcttgaagatcccccggtccgaagcacaatcacttgttaaatcctacgtcaacgaatcctcctttgcaggacccaaccaggtctcatccattgacgacgatgttactttctatgcactggcactggacggcaacgacaaactttccaaggtgaaagtaatgaacacggatgactgcttcagacatttccttctcaatattaccaataacgcccagctcaccccgttcctcaaccaaactgccaataacatcagacgcacctttccggctggtctcatgactgatgcaggcatgatagttgccaatccggccttcggtggggatcctgtttatgcaaaaaactggacgacgggtgcttatcatggaaccgtcatttggtcatggcagcttgctatgatggcaaagggattggagatgcagcttgaacggtgtgagttgacaacggaaaagcttggtcataatggacagcagcacgcggcaacacccaaaccgaagttttgctctgataaatatgtctacgacaatgtcaaagccgcctataatgaactgtgggactcgattgagaagaatacttcgcagctctctgccgaagtttggtcttgggtttatcgtgacgatggcttccaggtcaccccgctaggagtgctgccaccccctggtggcggtagccagataggtaaggtcttctccggttatcagcatcatccgatttttttttcgtgttccttttttgctaattgcctttatatctgtagaatccaatattcaacagctttggtctctagcctttttggctgtttccaggaacaaagcttataaagattgaatgcaaatatctcagttcatgccgcttttatccgattccatcggaattcaatagatggacggttaacaatggtggaagacggcagctaactttccagtttactttcgaacgtgaaaccttccataccgatatgtgcagcatactttcatctgtatatactctttcaacaaggcaagctgctacaattaatctctacttttcatacttgcgatatatatatgcaagttcctatccgttagtgcattatataaaacaaggcatattcactactctcggtgctactcttttaattgttgactcttactaggctctatcacaactataaaatctctttccatgatgacgatcgttgaaaagagcgagcagaaacatggatatggaggatttaactaccgcctaccaaagatatatgcaacacagtgacggtaatggcgaacacaccttgaggatatcagtgtttaactagactgttgtacttctggagacaaaggatcgttcagatgatagcccttagagcaccgatagaggcgggtgtttcccacgcaatttccaaagcaggagcaagtatacggaggaccggccggaaaaatatctgccaagaccagcctagataagaatatagtgagtatggacatcacagatcacacgatgtccgaagtagctaaagactaactttaagccaagtacgactgatacgaactgtctagaggtccgttccgtgagactagaggcacccacacgccatactctgatacctatttagcttcagctgacgctggctgattccccataatgtgagtgaataatatcagatacagcacaagtattcatcaagttgtctaggtcagacctcgggagatgaaggggtggatctcctatattcgtcttagacaaatccttggcagcctcgaccatatttagagttccacccaatgtaacctaaagctgtggtctggtgcttagtaagacgtttaattgaaggcaatctcgtttagcctatttaatcaatttggtggtaatgcttggctttatcattgagtgaataataaatgcctatactccgtacagcttcgctttatttcaccgtgaacttgattggaccacacttaaattgataatatctccacagagtcgggagtaacacattagcagatcaagcgaaaaccatgcactattggcccggggagacaccggacgagaagcagggagggagacgaagtgatcaaagaaagaaacagtgaatactcatttgctcggtgtctcggtgtctcggcacagaaccgagaagtctaaataaattaaaataaggccgaacgaacatcacacccgagcacatgcagcagcaaatgtaaccctagctaaagggaggcgattaaagcgaaggtgatccgtcgggattccggctgccaagtgcttacctgctgactatagccggggtttctcccacgtaatccggaatcaaagtgacatgcattgcctaaattagggcgaaagtgtcggacaaagcgcaggatgggttagcgtcaaaactccaacaaattagcgtcaacggacctaccttatctaaagaatgctaggaatgccaccggaagtcggtggatacacatgaatatatatgctttctgtatcgtgctttgagactagtattatcctacagatatcacacctattaaaagattctagagactgttgacatataaaccaaaatcaattagaacataagacaggcgctagggaactcaatggaaagtagaaagggtccgagctctccggggctagcatgtcaacatcttagggcaaatgttatcatcagggccaaatagggggttctcaaaaaacgatcagggttcaattgttttttattatcgcggtgcgtggcaagacagttctgtcgccgcaagcatggtggctcatttcatggctgcatggtatcataaacatggtcagctcagtggtccgataagaatttattttggattataaagaggatcataggaccgaataaaatgcgcgatcagctctacagccatactccagcgtactgtcctcaagtatgtccaagtcgcctgtagaaaccagtgacttgtccacggtggctagccaggaagccattggcgagaagtatcctgctgctgtggttactaccaaagatgagcatggacatggtgaagatgacgccgacagcgatccggacgcgattatcatcaccggtgctgacgcagctattcatctcttatctcttcgagatgactttgacacggtcttgacctttcgcagtatattacttgcttccggccttgcgtgtttccaggctgtgatgaaccagatttatcaggtatttccaatccatctattgcccatagagatactaacaactcgttctatagttcaaaccgaccttgattacgattcaaggaaccttcatcgttctcatctcctactttgtcggcaatgcctgggcgagattccttccccgtggcgataaattcgaagctcgctggagggcgaaaggcggccagggagccctaccatggtggatcaaggtcataaagttcttcaactacgggccatggagtttgaaagaacatgcaatctgttcaatcactgctacgtcggcctcaaatgcggcgtctacctcaaccgtgtttgcagcacaggatctattctacaatcttcccctcacccccgcgactgtgatcttgagtactatctctattggcctgtttggctacgggatctgcggaattctgcgtcccatcgctgtctggcacacggaggccgtctactggagtagtttgcctaccgtcaagactctccagggacttcattggcaggaagtcaaaaactcgaaaccgcttcgatacttttggtatgcattcactggcatgtcaatatacgagatcattcctgcctacatcttcccgtggctaaactctgtgtctattccggtaagtggtatcgcaatgatctcttcagatgaactttctgattatgagaatctcattggaacaatttattaacttcggactttatagtgtttggctgcacaaaaggccactggggaaactggtgccgtactcaacaatatctttggtggggcaaccaacaatcagggtctcggtctattttcgttctcgttcgattggcaatatgtgagatgatgtccccctataacacattgatctatcaagtcatctaacagaagcagctcacctctttccaaacctcactccctctcaaactgcaaattcatcaggcagctggacttttttcctgcttctttattatgataggcatttattacggaaatggctggaattcgagatcacttccattcatgtcgacgagaatgctcacgaacaacggcaccacataccccctgcacgacgttttccccggtggtgtcctcgacgagactgccctgaccaagtttggcttgccgaggctcactggaacttttgcattcgccatgttcatggccaacgcagcaatgggtgccctgatcgttcattgcatcttattttggggcaaggatatccgtcgctcctataaaagcgcgagagagggtagatatgatgatcggcaccatgatcatatggccaagcattacaaagaggctccgtggtggtggtatatcgtcgtgcttgttggcagctttattctcggcataattgtgactgtgaaagaaaacatcaccttgtcggtttgggcatatgttatttcactgctagtaggatgcattatcgcccccttcgtgagtacaacgtcctcgatactgagcttcatgcagaaaaactgactatgaccgtgctatagagtgtcatcctctattctcgcttcggtaatggtattgcaaccaacaatttgtcaaaaatgctggctggactcatcctgcctggacgcccggtcggtaacatgtacttcgctgcctggtcgcataacgtcatttcaaatgcggttatgctttccaatgacctgaagatgggcgaataccgtgagtatctatgtcattgttttgatcaaagatatgtttttaacttatctcttagtcaaaatcccgccccggatcatgttcctgacacagttgtacggcacagttcttggtggtttcgtcaactacgccatcatgatctctattgtgtcaagcaatcgagcgcttctcaccgacggcaatggaaattcctcctggagtggtgcaggcatacaatcttacaacaccaatgccgcatcatgggctttggctccctatatctataagattggtaccccatacggggctatacctattggtttagccgttggagctggtgctgtggttgttcaccgcatcttttatcacgtgagtaaccccatagccttccctattgcacttggaactgacatccgtttgactcttagtttgtacccaaaatcggaaagctcgacgttgcggaaatcaatctcccgcagtacatccaatacgccggttatattccctacaaccaaagccagacctgcgtcatcttcacctggatcaccgccggattctacgttcaatattatctccgcaactataagccgcggattttcaaggattattcatatctcattaccggcgcctttgatggtgctagtttgacggttctcttcatcctctcgtttgctgttttcggcgctggtgggccttcgcacccattcccaacgtggtggggaaacaacgataatgggaactacgattggtgtccggtagtagagtaggggaagggagttagatgatagggaatttgaatccacagagaaagttggtcacgggagtgtgaatagtgctgtcgctgaactccgagccagaacaatgtcataattattatttaagttgcgggccgtggatctttgacgggcgaatatcgacatattcacggggcgagaaccagatggcggatagactgtagtctctgcggtagtaggcagtggttcgaacaatagcttcggtttattcttcgtcgaaacagtattcggtggcggaacgatatccatggggcaaaagggtagccattctggaggtttgtccggtacggggtcctagcaagaatcgcgactcgccagtgtacctccccgaacacttcttggggccgatgttatcgtatggagacgggactggatcacggacctgagtggctagaattcattgcacggggacttcaatagcgtttaagggaagttttactgttttcgcgagactattatctttccaagggatacatcacagtgagctctgattggctagtgacataaggacctcgctcctcacggtacgctctccaaccactatatcattatcgagctggcctatgccattgctatagtgaacaaacaaaaacaaaaacatacaacagtgaggattcgctggtggtcacccacccaactactaactcaccggcgnnnnnnnnnnnnnnnnnnnnnnnnnnnnnnnnnnnnnnnnnnnnnnnnnnnnnnnnnnnnnnnnnnnnnnnnnnnnnnnnnnnnnnnnnnnnnnnnnnnnnnnnnnnnnnnnnnnnnnnnnnnnnnnnnnnnnnnnnnnnnnnnnnnnnnnnnnnnnnnnnnnnnnnnnnnnnnnnnnnnnnnnnnnnnnnnnnnnnnnnnnnnnnnnnnnnnnnnnnnnnnnnnnnnnnnnnnnnnnnnnnnnnnnnnnnnnnnnnnnnnnnnnnnnnnnnnnnnnnnnnnnnnnnnnnnnnnnnnnnnnnnnnnnnnnnnnnnnnnnnnnnnnnnnnnnnnnnnnnnnnnnnnnnnnnnnnnnnnnnnnnnnnnnnnnnnnnnnnnnnnnnnnnnnnnnnnnnnnnnnnnnnnnnnnnnnnnnnnnnnnnnnnnnnnnnnnnnnnnnnnnnnnnnnnnnnnnnnnnnnnnnnnnnnnnnnnnnnnnnnnnnnnnnnnnnnnnnnnnnnnnnnnnnnnnnnnnnnnnnnnnnnnnnnnnnnnnnnnnnnnnnnnnnnnnnnnnnnnnnnnnnnnnnnnnnnnnnnnnnnnnnnnnnnnnnnnnnnnnnnnnnnnnnnnnnnnnnnnnnnnnnnnnnnnnnnnnnnnnnnnnnnnnnnnnnnnnnnnnnnnnnnnnnnnnnnnnnnnnnnnnnnnnnnnnnnnnnnnnnnnnnnnnnnnnnnnnnnnnnnnnnnnnnnnnnnnnnnnnnnnnnnnnnnnnnnnnnnnnnnnnnnnnnnnnnnnnnnnnnnnnnnnnnnnnnnnnnnnnnnnnnnnnnnnnnnnnnnnnnnnnnnnnnnnnnnnnnnnnnnnnnnnnnnnnnnnnnnnnnnnnnnnnnnnnnnnnnnnnnnnnngtgggcggacgggaagccctgttttccacaccctatggtcgtatgtatttgatacggcgctggaggggaacatagagcaggtgaaaattatgaactatagctgtggtaggatagatagagacggcttatgtttcatcattactattatgtcaggtgacctatgctctgtagatggtcatagcgtcagatatacacgtcaagtgcttatgtctcgttaaggtaaggcggcgttgtaaggtagagcgaggcacttgaaagcggcgtgctagttcgcgaatagtactaatttcttggttctcaaaagcctggatagctagtagtatacctatacgtatgtaataaaagttatacagtcgataaaactatatcttcttttcatgcacgccttgatgttccccaagatattaccgaaacaggcaaccccgagcgcggctgagcgtttatatgcgaaccttggaataaagaaccgtggtatatcttatctgattctaagaccaagagtggaagaaacataaaacaccaggaagggtaatatttgagcaagcgcaccaccagttctgtatacacaatttatcgaccgaagtacttgagctccaagtatcttgccggtaggtaagtcaaagccgtcacaacaaatgtaaactcgttggcaacatcaccaccgtaatctccaatcacgcgggcaaggggaccgataaaccaagtctcatccatgcccatgcaccacgccacaaccccaagggcaaacgccacgctcgcgccaattcccaacggaagcctagccgggtcgttccatccttcgagatcatagttttcaaagttgcccttacgaaagatatagtgttcctggaacaggataatggcataacttgtgcaccagtatcccagcagactcaggaaattttgaagatattcgttcagcttttggcgaccaccaattgacaaggcgatgatacaggcgaagcagaacaatgtccaaagagatcgaggaatgcgagcgaagggtcgggcaagttgctgaaaggagatagcggaactataaatgctaatgacgttgacgttgataccggacaaaacgaggagcgtaaggaggaacttggcgaatccgcgaggatgaagcatctcttgaatgagatagccaatccctttctcatatacggcggaccagtcgggcttagtgttcaaagcggacgcgaccatgcaaccagcgaccatgccgatcgaggtgggaatcgagataccaaaagttgtcatgaggaaaatcttcaaacgactcgtgttggcaggatattgaacatagtagtcgctagccattgtgcaccacgaggcactggatccgtaaacaacggccattagactgagaacggcaccggagagagtcgaaccagtcacggtagccggggccgcattgtctgcatattcaccggtctcgccgtagatgatcaaaaaaataaccaaaaacaccatccaggcccatctctcgtaaatcaaaatggccttcaacccgacgcaagaaataaacagggccaccacagccaaaataacaattcccagaatcaacgagacgtggccatcggagactgccgtcaacgcaagacccccagtgatacatgcgacagcagcccatcccatttgctggataccgttcagcaaggcgaccagcttattaggccaccaaccaaagctgtaccgactaacactgatttgacgtaagccagtcaccgcgccaaaggttgcacagaacccagtcagcgatgcagccaagattgaaacaaatatggtaatgaggatcgattgtttcatagtcaggccgaattcccagccgaggaagccagtcgcaaagcaggaggtgttcatcgtgccactcgcccacagagccgccattgatatctcctccacccatcgtacctttcttttatcttcagcacgcttgcgctcgatggtatcaggctctataccgagtttcttatccagtcgagcctccagggcgcgaatcctagccaggataccggtctcttgagaggcattatcgtcaagtgagatcacctcaggtgaattgtatttttcagttgggtgttggcctgttgcaaggcctttctccggatcataggccatgatttctgatggagtgagacgcggcgatgggaaaacaaggggcggcactctgtggccacctggggaatcggtgaatttttcaggctggggaaaaaagataaggcttgtatgggagaaggtttgccagctccactccggcgctgtttcccaatctggtacataagtagttagcggattcagtaggttacattggccgcatgtactccgtactaactggttagtttgaatcttggcttcctttcggttgatatttcctacccacacacgccacacgggccccttagtaattacgtggcgccacggggctatctacagactccgcttatcgaaaaatgtaataagaatcgggtgtaggatttcgcgagtggtgaatctatgtgctattttatatacaatataaggattggcctacattcagggcttaggagttcaaaacttgtaaatattggagttgtggatcacaaaaagattggcgtataacagtatccattctcgtctgtcaataggtcggtgttggaatagataacaagccttgcccagaaacttggctcgcctcgggaggctaatctcacccgccctatctgatactcgtgaagccacgtgatacggcacgagcaatacgctcaccctctggagatccttatggaatatcgtttatcgctaggaaaggaaatacaagctggaggcaaggccccggcgagatttatcaccctgggtgtgtaggcgggcggagactccggtgagaattgtcaccccttctcgcccacactcaccgtaagtcaaattccccgcccactttagtgtctaaggtacctcaagaattggccgcgtaaattatggaaatgaaaataaataaagaaaggaaaaaacatacaacagcatgtttaaggtgatggtcacctaacgcccacggatcgggcatgggcggctccccgctctattcagggcactccgggctgatattcagcttgtatagcgaaatgtaacttccgaatccatatgattcagtcgaacctcgatggcactagaaagtatcgtctccgcctcggtataattgccctatttcctatgcgtaacgtgcagcgctttcaagtagtgtttcccaagtcttcagtgaatcctatccaaagggaggtctgtccgttacaaactcagcatgcggaaaaagcaacttgcatttatcccagctactatcaacccctttagggaaatgcacacagatgttcaattgaccttcttttgtgttcaacacatatatcaccttataacctacatatcatttagacacggatgtacacttgggcttcaagacttaaactgcagccacataggccattccttggcagtagaaaaaaataaaaacatacaacagtgaggattcgctggtggtcacccacccaactactaactcaccggcgnnnnnnnnnnnnnnnnnnnnnnnnnnnnnnnnnnnnnnnnnnnnnnnnnnnnnnnnnnnnnnnnnnnnnnnnnnnnnnnnnnnnnnnnnnnnnnnnnnnnnnnnnnnnnnnnnnnnnnnnnnnnnnnnnnnnnnnnnnnnnnnnnnnnnnnnnnnnnnnnnnnnnnnnnnnnnnnnnnnnnnnnnnnnnnnnnnnnnnnnnnnnnnnnnnnnnnnnnnnnnnnnnnnnnnnnnnnnnnnnnnnnnnnnnnnnnnnnnnnnnnnnnnnnnnnnnnnnnnnnnnnnnnnnnnnnnnnnnnnnnnnnnnnnnnnnnnnnnnnnnnnnnnnnnnnnnnnnnnnnnnnnnnnnnnnncttaagtacggctgagcggacgggaagccctgttttccacaccctatggtcgtatgtatgagatggtgaaggaaagagaatcatcaagtagttattaaatgcagagtaggaaccaaatcgcatgaaattgagtcaaactacacaatgcgtatgagaattcgctcgttgacattatcacttctgcttttccacaatctcttggtagcgatattcacagtagtaaggtcaatcccattttgagtagcgaggtcacgatctacgatagatcgctatcattatgtgcttcatgtttgcttgcttgctcgtttgttcactcgcttattgtttgcatagtctgctagtttgcatttcatagattgttttctagatagctaagcgagaaggttcgaggtttgcaacgtttgcaaagtggtcaactatatcaataggctgcttccaactttgtaacttgcttcttctttctctcctcatcttagttattttgaattgaatgccctcttcggttgcaagacctggcacgttacagcgagcacgaattcaatcaacgattgttgcggaaaatcaacgaataaagcaagaatcgctgggtaaacatctgatattcaagtatccagcttatctatgtgttcatatttaagcgctccgcttcccattttaataaaatttcagaattatacacagttggtatgatggttcaggctgagtgtttgcttttgcctggttaagcaatctcgtattagtttaaggcttcagtatcgtgagctgaagatttccgggtgaaagcgagactcgccatactagccagcgtgtcgggatggtcctcgccgagctttgtcttgcatgtctctattatctgcacctgcagctgctcggcattcgccccctaaccttcattacagtaaataattcctagtgttttccagatgaaagccttccctgtttccttggtgctaatacccctcaaatctatattcacacgtctgggagatgcaacatagagatgccgacgaagctgtggcttatggtcttctttgataagttgagagcatgcagcaagcataaacttgatgtaccacccctgccatttttgattttggtcgccacaggttaccctccactgaacctagctgtgcattgtggtaccgggccactttccttgcactcgctgtactagactgtagtgagccaggacatctatgctttcattatacctgaagtgcgactgccccccaagcctcgcacgactacttcatacgggatgtctctctcttcgtgtcgtattgttggttttctttccagatcattccatagctggtctcgttgtgtatagcttggcactgtctctgtcgggacgaaatagatgtgcgttggttttgtttgcgttgctaatcaagacatctgtcagctggtgttagaatccaattaaagcagatgatgggctgaccaatttttctttcgctctcggctttgagccatcttttgatatatctcaccacatcttcatacgtttcatcatttagagactggcatccctgaatctccctatgtaatctctctgctgaacgttttattgtcccttgaatcactgctgattcccggtccaccacctggattgttatataagttgcatatcgcatatgcgggggatttgaaagctcacatgggtgattgctatgccccatagaaattctctctgagcttcaaaaacgcaaagagtcttgcgagacatatccttttcgtagataaaagagtgaattcgatcgtataagtcgtcactagcatctgagccaactttcataactttcaaaagagcggtatctgaacccctccagtatccaaaaagagaaattatctctccaataggagtgagttttgaacctcgatgcggcgtgctcaaaaagacaaatcctcccagactctcgagaatttcaggttccaaatcgctattttgcaccatgttcaccacagcctgtttccctattagttcaactgaaaataacccgatgctgaaccaaccttacctggtcgatgattaaaccaccaaaactatagccaatcaaaatgataggtcggcttttctcctagacgaattaagtacctagattcaaatcgaaatcaagtccaatctcttacctctagggtctctcgcttactggcgagagcgtgaatcaagtcatcgcccaaatcttttaacgacttgctcagggcattgctcatccatctcgtatcgtaattaaaggccatgatgcgacagttcaaattttctttcggtaacagatcacgaacccatgacaccttttcagatgagcgttctgtagttgtcagtggattcgaatcaagaccgtgaacgtagacgatactgacaagacaattagccatcaacccatgaagagaccacaatttacgggcacaaactcggcaagaaaggtatctcgggaggtcacgtcggagggggaaaagattgtgatgcgctctcgcttcatacacacagagcctcggaaaagaacaacctgcaaaggggatagagcagcacatatcaaaaaattgaacatggtcaatagtatttttggaattgaatagttaggaagtgagaagatgtcactaatcagccatgaaagagtaaagagggaaaaactccacactcgatggaaaagcctttccgataggaacatagcccataaaaggtatgggatggtgattgtaaacagcatattgccaatacacagttaaccaaatgtaagttgaaaatatcacgatgaattatttgaaagagaagcagggggtggatagggaatgggagctggacacgaatttggcccctcagccaaaaaccgagtcgtcagggtgatatgccaccctaacgcatgatggcggggcccagatgaattatctcgaatcaagcagatgcattgctatcctacgtctgggttactgttaccattaccgccctagaggggccaggtggagtctactgattgcgagtcggacgtggtccgtatcaaccgtcttcatataaccgccatcgggattcatcacgtcgagattcgaggttgctctctagtctatatatagcacatgcgttagccccattaattgtgaggggtgcgatcatccgcgtctcagcttgcaatatttcttcatacacgaagcgttacccctcatcggcgaagatgttctcgctattctctcctcaggtctttccagcatggctccgttctccgagaactcacaactctgtgacaagctcacaataaccgccgatggccacttgtcgaggcgaaagagcaatcccatttcttcaactcaacaattgacagagaaggatcatcttcctggcgagccaaggataaaattggaggatgaccatgttgtcaaaactctccagtccgagttcatgacgcgtaacctggacaaactttcgccattcctttggctggtcgccaaacaagatagtactcatatatcagccctcacccaccaaatcgtgagaggacgtgaagtgattatcacggaagatccgggcctccatctggtctggatctacgatcgagtcttcatcaagccaatgcccaagtatctcttatcgcacgcattttggcagttttacctcgccgacagaaattcaaagatcccaaagtatcagcaacacaagatcgctaaggcagttctcggattcatgcgctcgtatgcctatcttatacgccataaatcggacttcattcttgccaccaatgataatcaccgactactaccgaaaaaaatcacatattcatctttcgtcaagttcattactgcatttgaggagatatgtgacgattctgtgtctccacgctacaaatttggcgaactgcgtctttcccgtctgaacttttggaccaagattttcctcggacgtctcatgtatcacaaggtgcatgggcagtatggagcgtattttgcacgttcctacggcaccttactgttcatctttgcagtcttcagtgttttactcagtgctatgcaagtggcattagcggttgttccacttgaaggtggatggtcagtgtttgcatatacgtctcgtggatttgcgatattcacgattatctgtgtggctttgattataatatctcttctctcggtttttattgttctttcttcgcgagagattctttatgccgtgaatgatctcatcttgaagcggagaacgaagaaagttggcaatagtgtgtgaaagaaatgccgctatgatcctttcgagctacatgtaatcttctagactttcgtacagtacgcatctgactcatataattgaaggaggagcatgtcctcggttctaagatcatgtgactctgcggcacgagggcaggagttacattggacagtccacgccgagcattctgttggccctgtatggggtgcgggcgactaagtggatggcggcttcgggatggtgcgttgcccgtactcgtgatctatgtccgccgggaatgggaatatcttgagccaaagctggcagggaagtatatgtgatgttccgcttatctgagacttcatggatcagtacgctgacaagtatgatcttggttaaatgtgacttaaaatcaaaatactccaaatctaatcgcgaaaatgagaataattgtacaattgcatggactggcaagcaaatatcaaacaggaactgccatgcctgggcctttcttctcagcggtattcttaacaggatgaagtagcatagatggaaaacagagtggtccgtataaatcctctcgctagaacaagaccgagtcagctttaatgacgttatcttctcgaatgttcggggaagagaatgatactaaccaagtcaccgccatcgaaccaatttcgaccctgtggatcctggtgctgaagtgaagtgatattagttctgcaaaaaggcaaggcaggggggtaattctcacataactaccgtcggtaaattgattggggtcaatcgggtagcccagccatcgccggtaaaggtcttctgaggtctgggtagagaacatataagataatcgatagaggatgtggtcccagcggtggtcccagttccaaatactatcgcttcccccgttgattttctggggttcacctgggtttaagatgcgtccaagttctttggctgtccatttgccatcaatgtacacaggatgcggtacatggacggctttgaggccatgccagagggcaagtgaaggagctgtcatttcggaaacaagtcccattccttggatttgcagatcatgcatttgttgcaccaggatctttgatatgcgccccattgcaacgggagatgctcggcgtggagtattctcggacacaccccatagtctgttcgagaacgtccactttgtatctacggggtcgaagatcggtaagaaggagataaaatctgcttcttccccgacaccccattcgtacttatcgtcctccggagacggcgtagttggcttggggcctactggcgttgtatctgaggtgccctggggcccccaaacactgcctcggccattcacagaggagccgaccatccgtacaaagtcctgccagctcccgtgtatccctggaaggtagaaataggcgttgcgctcccagagatatttccgcggttgtctctttgcaaattccacggacttttcaaggaaatgatagctgtgccccataaatctggcatccatttccagttgccagtagtattcaaactcctgaaacgattgcgaaaatatctgaaccggttgccaatactggtaattggtgctgtgaatctgttagacgacatgcaatatagtgatcagcctcggaggtatcgaacctgtgttcatcgactttagggtaccaagttttcaaggtctcatcgttaaaaagtatggtcacgtccaaaaactcgcgtggcacaaagcgagacttaacagattgcatagcctcatcatcgtctgtatagggaatgtccttgtctttaacatgacacaagatgaagacctcatactcaccgccggagtgtaacgacagttccatgataagagatcgcacacattgtttgaggttctcagtccaatctatatcatgccacgcacgtagtatgacagccgatcttgatttgtgtttcaagtcgcgagtagcagagctcggtcgatcgcggaggaacttccttgaagaaagaggagggtggagaggaagaatagatttgatcgaatgagagtcagtctgcctcgtcgagtatcttgcggcattcctttcaacgcattgtaactgcagtgctccccaattggcttcactcaaatttatgtgtggttggggatcgtcactgtaaccatacgcgcccaatcgagagaagcggttggcacaagtatatgcatcaatacctattgccgcatacgatccgagtaagggcaagggaaaatctatcttatctgtcaaagttgtctcgccattgagggtgggttcgcaaatacctcgaggaattcctggataaacggagaccatatcttggatattcgaacgactcaatggccttcctcgtgggccgtcacaagcaaaaaaactgccgagaaactccttgcgccactggtcgctgttatagtcgggataagggtcatagactacaggccttgggggttcaggatcatcacttccatgtcctattgtcaaagtcccgccgcgataaaagttgccctccctatcaatcacgcgttaatatatacacaaattgggagtcagatggaccgccacataccggacatcacgtagagttccaagtccgatcggctcatgggcaaatggcgtttgatcatcttgtgggcgtacttcccgcgacccgctgcttactagatctccaggccgtatcacagtagacctggattgccctaggtcaggccatgagccagaaggaaagtactgcagatattcttgccttcgattcaagacacttccgaaaatgaacaataatagtatggccaacagagcaagatataatcctcgtgaataacgaaaaatattcaataatggagatagattaatgttggatcgtctcatcttcaaaagagatgccatttagccagactgcgatcgatatctgggtgaacaaaggaagttggtgaaaggacttgacaaagagagaatgagcaaagacaatgtccgcgatagcgccctattaaccatgcaagaccccgctagtgagtgccacttttccaggatccagggtcatcggcgtatcgcctgaaagcatcctagcaagcccggcttcaacgctaataagtctctgctggtctatattgtatttcgtcattcgataccaggacacacgatgcaaaaaccccttttcagggtcatgtcgggctggggaccaaaccgatgtcgcatagtgggtcgggtgagatcgctcgtgctagacgatgtacggaggagtaccagtgggctgtgtccagcgggccgctcggagcgaacagacccgtgtatattgggctaggctccacctattgcctcatgtctacagtgtatgtgttacctactctctatctcgttccctcatctgccgctgctgacatcgttccagatactattgactcgttggcacccatcatcccctattaccgcatgtactaacgattaccgtaacatgacagggacagggaatgacaaaagtacagcacggggccaatactacgcagtagcgtgcagtggcctgatagggttactgagagacacgggattccgttgctccactcagggcggctagatacatattatttcccaatgctcccttccgactgtagcgccaccaattcgccttctccccagctgaaacgaaatgtatattttgtatgctgatctgctagatacttctgatggatacattactactgcaggctttgtctgacctctgtcatatatgtatagttataaaatctactccatcaaggctggtagtctagatttgaggttgaagatgagcatgtaaatggaatgataattgggggcggcttcaagatgttttatcgtaattttaaattgacaggggtttgagggctctcaacccgggctggaagcgctgatcagttgaaggatgttgctcagtactgcgcaaagataaaacatatgctaaggccactttgttttccttgcgattctctgcttctgatatccttcagccccgatatagcccgggttttgaaagcggatttgaaagagccgctctttctttctattgaagcagcattcatacatcacttacactgacatggaatcctacttccgtctcaagggcctcgtccttcaactgtcgcttttgagtctctttactgcagtcttcgccgtcgaccaatgctattatccaaatggagcgacaagcacagataccccgtgttacaccgatggagatttctctcactgttgcgcaaacacgtctatatgtcttaccaacggcttatgcttatcaatgaagcaacctttctcgctgtctcgtggtggttgtaccgatagtacttggagaagcagccgatgtacagatatatgtggtaggtctgacattcatctaacataatctatatcctttatctgactcctgttatcagtcaaggcccaaggaggtgccggctcagctgttgtatggctcgacgggagtgaaaataacgcgacctattgttgcaactcagtccttgttgatccgttttctggggaaaagatttgtagcaacgtcgatggtgcaactcaaaccagttttaagatcctcgacggatacattattcccagtgccggggttctctcaaactttgaggaaatatccaacaatacatcttccttcgttgccaatggtaccgatacggctgtcactacggctgtcactacggctgccactacccctgtccctaccgctaccgctaccgctactgccagcaacgaaaacagctgcaatgagtctagggaaattgcaatcggtgcaggagttggggttcctctcgcagctattgctctcctatccattggatgggccttttgggagagaaggaatcgaaaattagcagcccttccggcagcccaacctactcctctatttcagccatcttaccaagtggcccgtggccacgagagctaccatgcatatgagttgaaaggatctccaccgaagcctgcggagctctacactgcctagccccgtgagtaggctatgacatgtgataagcaggtttattatggcttagtatttatgtgtgattgggctgtgggaagagagatactttagtgaagacttgattagagcattctataattatggagatataaatgagaataacagggaattgacactgtgactagagaggtgaatgaagatggtcttttgagtggtccttctagatgtccttcttacacatacagcgtataacctttgatgatatagttctatggttgagtcgttcctattcttaccgcagctatgattacgcgagaggaatgtttagaatataacactattcctatgagtatagattcaagatatattcatctttcttggaagctgatatatatgtctgggacataggtcatggctatcacgattttcggaagaatgcaagctcaagtcctcgaagctcattcgagccagcaagggccagtcgtcaggaagacccaacttcttgatttctcgacaaaccaagtcgccaacaagagcatggacattctgcttgtatttatggctggtgacatattcggagatcctaaaggactcaggaactattagaaatacatagtgaaatctgacagaaatacagttctaccgcataagtttccgcggaaatttctctataccgcctttgcgcaattacatccactatcttcaatgattgaacattgcttctaaagaatgatatataaaatattaaaacttacattcaatacgtaggctatttagctattacgatcatatttttatatatttttctcattagagatggatgtctagttaatgttttaagtatgtggattgaaatatatattttgacgattgggctggttcgcggaaacttttgcggttcgactgtatgcagtacgaaaaagtatgatgtaatttaacagatatgtaaagtctctacggagtactagctaggaaatgtcgaactgaacatgcacgtttctgtgggattggtcatcccgtttcatcccggatgagctgggcttttcacctggtctcatcctcgaatttcactatggatccacctcagtgttcgacaaaatcaaataaaagcccgatcatttgatttaatacggaagtgaagtataatatacaggaatatattatgcgtgatctaggaaggcctcgagtatcattattcgaataaagttgcagataccctttgaacagggaagcatataagaaattaaaccaatgatataagaccgaagacctcaattgcctatgtttttgtctctcgtctccagaaaacggttgcatggtcataggcactgccaaaagcacttctgtgtcgacccaaccgaacgtaatcaagcctcaaccgtgaaaggccacatcgctttcgcatcctccgcagatttctccccagaaaccttctcgatgtacaggtccagtagctccccattctgccttcttttctcgtctatatccaacggcggcgcaatccacccctccgcatcagtatcaagacattcctcagcaagcgcttgaacgtcatgccaggctcggtattccgcaaactgacgtccatgtgcatcgagctcgtcccggctgaatgaataagggcattttcctgaaaatccaagacttgaccaattctgtaaaatctctatcaagcattcgcggagcgggacaatgcccacttcggagatttctccgcatcgggtgaatagttctcggaagacacggggtacgttcatggcattatgcgctgctctgtcttcgagataggtcgagacctcgtaagcctttgctagttttacctgtgaccattcgcggaatgcaatggctttgctgtccttgtctagttcgttgaaattatcagggagttgcggttggaatattcccttgacataatcgtaagtctgcggaggcttcagaaatatcggccattgcgcctggagaaatgcggggagtatagacgttgactgaagatcgataagggatactattcttgaacattcgtctggggcgacaaagatatttcccatatgaagatcggtgtgccatagggtaggctgacaagctcccgttaatatttggttcgagtctaaaagcttcatgaggttcgctgtgacttccaagagctgggtttgttgttcaacggttcctttgtaaaagctcgatcggctttgttggcctcttgatattcgaagcaattcacgccgtgtaatggatattcccaagcttgaaattgaatcccctgtgaaatgttagtaggtgaactgccaggttgtataggtaacgcacagggtccttggtcaaattctagagtagtatcaggattaaacttcttatcgcaagaaggtccaatgcagaaagacttggatggatcgatttcatcaccgagagacctgttcggtcggctcatgtcagtccggaggtatagtcctccgtaagcagggaacgagatagccgacagctgagcctcaagcttggtcaagttcttgatcagctgtagcctttcgaattcagtcatactcctccatcgttcatatagaggaaccccggcagctttctccataactatatattcggcgccaacggcattcgaactatccgacgaccaggaaagaacacgagggacaggaatgctagtgtgtctcccgactgtacgtcttagccactcgactctctctggaataggaaccatcataccgtattctaaaactcctacttcaccagccgttgtcaatgaaggcggaccagcaatgcggcatggaattttggctataacttccgttccatttgctttcctcatcaaaaaagccttgctaaaccccccttccatcttctcaattgctgtgaccggactggaatccccggccgtggccacggtattgcaaagcgcatccacattgaaccggacatatcgtcggctgagctgatgttcttcatcgaccaggaaatgactattggtgtaagcgaaaaggtcctcacggagaattggtatgcctggaacatcagcaacggtctccagcacggacttcctcgcttacctcggcaggttatcgacaggggcccccctggccggccatgtcgcttcaacacatttctgagaattgacagcatttcgcatatctacgggcttgaaggaagagtgcgaataaaatgaagacgggatattgcttcttgacggaatgggcggcatatcattcttccatgttgtcgacgactctccctacttgtcaacaaatcaatctgttttgtttcgagtgccaatgccaatttcaaagttccataattcagtgaaataattgtagtagctaataatatgtatcgacttgaagtgctaggttatgctatacaaacacaatgtcggttcaacatataaacagaacacgaaatgtaacagcccaatgtatatgccggagcaattcaaaatataccaagcttagaccaaaagccaagctaccaacctaattcgacttatccgaaaatgaaaccagagcatgataagactcagtcaaaggccacaacccctgagcaaaaccaagcgctccagcaacaagaagtacataataagccaccgtccacccaacacccaagccactgttaccccttaccccaacttggatactatcatcagaatcctctttaccccgagtaatagggggactgatatattcacccgcctggacccgtccccagaaccgcggcaatccacaccagttacagaaactatggatgagaaccacggccagcaacgagccggtccgcaaatagacaaaggtcgcataccagccaaaaatagtcgtgtagccaaactggaagagcgaccgcagcagggcggccagagccggggtgtccggatgggtcagacagaactcgtaaaagtggtgcacgtgcgcaatgccgaaatacagcggtgccaggaacacgatccggcccggcgaggtgtgtgcgagtaaatgcagcggtaccatggcggatcgaaacatgacttcttctgtgaaggggccctaaaagatattagattgaaatgttgttaaaataagggagggaagaaaagatggaaaacgaaaagcaattgcataccgcgacataatttctccagccaatccagccaccgagactctcagagagcttactacgacggaaccagaacttccattcgccctccacaatgccacgttcgaagagcgggccgaggaacagaaccgcggtgaggaaaagactccgaagggtctccagcaggccgacgggccaccagccgaggagtctgacaccggcgccgagagaggaattatcctcgatgatgagccagaggacgaggacggagctcacgatacaggatcccgtgacggcgcgaatgcgggcgcgaatcacggacggggcatcgcgactgagatttggcgatgggcgggttgttgatgagagatagaatggtaacacgtagagtagtgtgaggaggacctgatgggagttagatacgagattgtgaattgtggttttttttcttttcgtgttcatcgtgttcttgttgtttctaggagttctacatacagagagaaaagcaacggtatgttctgacagggcaggttcatctggattgttagtcgagactcttttttttaggattcccccttgactcaccctgcttcgagtacagactcctcagtcgagccattatccctaccggcgccatgatctgcagagttggggaggttgctatttatggggatggatgagagaggagggagtgctttgttggtgttaccgtacggggagaggaacggtgattggctggaaataatacaatacagtaatgtactgtcaccatgcaccgtggacgtgatcatggttgttcctattgttcttttgatatcgacagtccgacgttcatattccggtatatatagtcgatctatacatagcattgaccagaatctcggtttcaggctagacgaacaccgccggtttcaagccaaacctgattcgaactggtggaccgtgcaaaaacaggatgtgagctctcacccctggaattgtctgagtcaatgcgagggatcgtggacagttattctccgattacacgagggagacatttattggcaatgagcgtctgattattgttctcggcctgcattctgcctgtcagacctggaccgacgcatagatggagtagactagtggcagttcattggcagttcatcaggatcagggacaacgcacaccggctccacttcgattctgcgattaaatgagacgagatgtttcaaggagtcagtttgtgaatggctactccgcattcaatatggatttatatatttaaacggtagcccagggagtatgagatgtaaatatcaacagacagaacggacaccagaacagacaccagaacagaacatcccaattgcaaccagtccaaccagaagaaacaaaccaattgcaacttgtacttttgatctcatccaatcgttaatagccaccagactgtcaattcaagtgcatgcagcctgcataacccctgcagtctaagatctcacttgcctagacgctcaccgctggggcaacaaaattcctcccttccaagtgtctcacgttcttcttcgacttcgtgtgcgcctctgcttttctgtcctttttgttttgaaacgttttaatgattgtttttcgaccactctctttaatggccttggatgtttgaaacgacctaattgacgacttctgcacgtctgcccacactcttttgatgaacatcagcctatagaaccaccctggatatccaagggtaccacattccttacatcggatactcgactcggaaaaacaacaacactcttttgacttgtttacacatctggtttgccaattgccctttgccgtcgactttactcaatcagtcttttcaatcaatgctctcagtgtgtccgaataatgtcttttcccgctcgctcaacctcgccccgcgcgcgaaggccattgcacgagcgtacgccctcgcactccaatgaaagatcaccaacccgctcattacgcatcgtcccggatgaagaacttgatatgtacaccgcaaccccatttccgaccaagccggagcagattctcttgccgcttcccgggaaaggccaacaacaatacatatcagacaccggtttcagctactccgatcaccacctgggatcatccacgtcgacctattcctcaccggctttcagccacccggcaccccacagcccgcgagatcactcaattggtagctgggatgtatcctccaccgtggataccggcaactcgcccccgcagttgtgggatgacgacccatcctccagcaagtcgtcgctgccaggctcggggaaagcaccagactatgggtccgagagttcagaagcggacttctcagatgatgatatgggattgccgacgaccaccccaacgataaaagccgtacgctcggagtcaactatgtcgccaaaatcttctgccgagtccgtgactggctactccagccctatagttgaacaaatcggggccccgtcaagtcccaactttgtaatgctggataactcgagcatgaacttccattcagagtcggacccgcgcacaaactcgctctcgtcgtataactcaggaggaaccgtggttcggcacgtggggtctgcaccctggttccaaaacgccttccaaccggcctcgtccgagcaatcgagctatggatccccgtcattccactccagcccacccgcgcagtctatagcctcattccactcgagtccgatcgcgcaatccattgcctcgttccgctcgtcatccagggcgccgtcgggcagccgttcccaatcagcaacatcctcttcgcgcagtctccgttccgcttctgacttgcaggctgccatcgacaatggcgtacccattcaatacccgcgtattcgcgcgccatcttcaagctcccgcaccggtgcatcgtcagaacgcgacttcacccctggccctccatccggacgttgcaatccccacttggcatcaggacgctggaacccgcacctctcaactgtctcatccatctggtccgccgatgaatcaaccaagctcgctggagaagcagacacggactcagaccgcgatatggcagcgccaaccccaccaccaccagcagccctagcgacagaaacaaccagatcctccgtctggcttgtcgacccctccaacgacagcgaagacgaacgtctcgacagcctaaccaagctcccaaaccgcccggtcttctcccaaagccaaagtctctcctccggctcaaaacgaagcgacagcacccgcagcctccaacgcccaggcacaggatcaagcacaatcctcaacatcctcccaacctgggcaaaagtctactacctccgcgaaccaatgggcctaaactcaactctctcaatgatggacgcctcccgtccgccatccatccgtccaccatcaacccgcccaccatccactcgcccaccctcctctcgtcccggaacctcaaactcaagcatcttcaacctcgtcccgggtcccctcaacgtcccacgtccccgctccccagaccgtcccctccccgatgccccgcgaagccaagaaatcacccaacgccgcgtagacagcgacccgcgcgatccacgcgcccactgggtcccgtccccgcaacccgaagacggcgagttcaccagcagccacctctaccgcctccgccacagctggtccccgcatctcgtccccgaccgacgtgtcgtccagcactcgacgagtcggtggcggccgccctccctcgactcgcgctacgagcctgtcctcggccggcgaaatatccaggtctactcattctgcctggggttcattttcccgccggcgtggtgtgtggctgcgtttctgcctctgccgcctaagccgaaggccgcgcagatggtcgagtttcactctccggatgtggggatggcgcttgaggctcagaatgtgaatctgcagcagcggaggagggataatgcgcgctggtggaggaatcttaatcggtggatgatttcgctcggggttgctatacttgttattattattgtgcttgctgttattgggactaccacgggtttttagggctatttgttccccggattggactgaactgcgttttattgcggtctttttatttacgctcttacgacttggactttcaacactggtgattacttgatgctttttttctcttctttttcttcgcggttgagctcccggacagccagtcgactggtttcttttccccttgctgttcgctatattgcagacgtcttctccttgctgtgatctcttcttgattattgacgattcagccccttcttacgttcttcttttcgcttctctgtctgcacatttgttctgaacgactccacgacttcaacgcacataaatatccttctgttttacattctctcgacgtttcaacatttgcctcggatctgtctacggctttatatgtttgttgggattctatgcatggtgacagcctttgtttacatttatgctatacgtccgtgtattggatatatgtttttgttattgtgcttttcacttcttctcttcggcattctatgtatcacaatttacttatgctatactcaacttcttcattactctttgaaagtaattgaaatcaaatcaaagctcgcaattctctaaaacccatccaatccttggaatatctatagactgatctcgaccaaccatcgctattaaacataataaagacgaaacactcctactgttctataaaaaaagagtacaccgaaacgctgatccagaccggctattcaccccgcttctaatagtcacctctcactgttagatctcaaccaaaactgctacagcctacaacttccgcccaagcttttgctcaacggcagccttcagctccgcgcctgtaggcatcttaaccgtacttccacgtctaccacgggactcgatctcagccttgatctcagcaacagcctcgtcaaagtcacgctcgggatcattcggcaggcctaggtcaggtggaagcacggtgtcggtgcttacggcgttaggacggctgcggtgcttcagttgagagacgaggtattttctgagcggggagaaggaggcgaaggcaactagggaaacggcgcagttaaggatgccgtagaagtagaggcgggaccagacggtgacggagtcgtcgaagttgaggatgataaaggggatgacggcgaaggaaagggtcagctgtgttgccagccagctgaggatgtcgtagtagggcttgtttggtgttggcttggtgccgtccggtgtgaggaagaaggggcgcacgtagcggcggaagtctattgaatggtaagttatggagggagtggattatggaggtgtattggtgcttactctttgccgcggtctggataaacgagcccagtataaaggtcatgtagtatcctgggtggaaaccgtgccagagggcgctggtggcgaaggtagccaggctagcgcggaagcccggtttcttgcccttcggcgtaacgcggaggtagacgtagttgcgcagccagtggttggtgttcttgttccagttggctaggtaagcatgggaattctgtgccgtttccatcgcccacggatcgacattctgcagtcgattccagaagaccttgcctgttttcgggtcgaagctgttgtatcccatgccggatagaatacaggcaccctcagtcagagcccagacgccgtaatacttggtgcgagcggtgaaacccagcatgaagacagtgaaaacgcgacgcaggaaggaatactgcaagaaggcgtctgaaagcacaaagtcggtggtgaagtatgagctcagttggatgaaggcgaagatccagaccaacccggcggcggccttcagtgcagcaggtcttccgctgcgagggatcttacgcttcttccgggtagctggcaccttggatgggtcagtgcctggcggaacttcaaagagcgtagtgtcgatccaacggcgataatccacgtattcaaaggaaggaccggcaaagagagaagggaagaacaagacatagcccagatagtctacaatacccgggaatttcgtaatagcagagtacttctgcgaatccgagagttggtccttgggcagacggccgtcatgaatgttccagcagaatgagctaagtttcatgaccatgaccatctgcgctccagtaatgtcaacggccgatttgtcgttcgccctctgacgatcgatatggttaatcgacatgtggcccatcaggaaaaggaacccaatccacggcatcagtgatccatccacgtagtaggcgattgcataggtagccgcggcactgtatagtaaggtgcgtagaccatcccagaggtcgaagagtccgataatatagaacaacgaaacggcgataatgaagacattcttcttccagggttggccatcggggatacgtttgaggagggcggccagtgggtaggagaggaggaacgagccgatcagcttgactggagctgggggtcagcaattgctagcaattcgggagcttatggaaatggaagatcgtacgctcatcagttgatgcgccagtgagtttagctggcacctcaaatactgcggggagaagtgttagttagaccgagcttcccaagtttgaatgagggttgacatactctgatctacatagggcaacattgttgaccatgtagaagatgaaagaacagacaaaacagacaaaaaagaaagaagaagtcaaaaagaagatcagagcagtgaagaaaggaagaagaagccaaaaagaaggaaaagaaaacagctcgtcatgtggaaagtggaattccccccaacaagtttccgccctctccacattcagcccctcgatcttcaacagcttgaacagcctcaatcaggagctaatagccactttgaaaaaacttatttcctggtgaaatctccccaccatggacgtcgtcgcggctgcctcggggtacatctccaagatggtcaccgtgggtgagtccggaacctcgtcatccaagatgaagatcttgcttctggatagtgagacagtgggtggatttaccctggcaatatactgatctgattgctaacctaacccctatgggtataggtccctattgtttcgaccgcaatcacccaatccgcccttctaaaccacgaggtctacctcattgaccgcttggacaatgccgcgcgcgagaagatgcgacatctacgatgcctatgcttcgtacgcccatcacccacctctattcaatttttgatcgacgagctgcgagaacctaaatacggcgaatattatatctaccttagcaacatcatccgcaaatccgccctggagcggctggcagaagcggacagtcacgaggtcgtccagtcggtccaggaacagtttgccgacttcctcgttatcaacccggacctttgctctttgggcttaggtttcccattgcaacggatatggagccattcgccggatttatggaacccagattcgttacaaagagctaccgagggggtcctggccctgctcctcgcgttgaagaagaatccgcttattcgctatgagaagaacagcctactggcccggaaattggctacggaggtccgataccacatcacgcaggaggagcagctatttaacttccgccggaccgatacacctcctatcctgcttgttcttgaccgccgcgatgatcctatcaccccgttgctgactcagtggacatatcaggccatggtacatgagatgcttggcatcaacaacggccgggtggatctgcacgatgtgccagatatccgaccggaactgaaagagattgtcttggctcaggaccaggaccccttcttcaagaagaatatgtatcagaactttggtgatctgggccagaacattaaagaatatgtggagcagtaccaaaccaaaactcaaagcaccgcgaatatcgagtccattgcggacatgaagcgttttgtggaggattatcccgaattccgcaagctggcaggtaatgtgagcaagcacgttaccctggtgggtgaactcagtcggcgcgtcggtgaagataccctcctcgatgtgagcgagttggagcagagcctggcatgcaatgataaccactccaatgatcttagggtatgttcaatagttaaactgattatgctttgctcacggactcacccttcttctccagtcactacaacgaatcatcgggcagcctaatgtgccctcagataataagttgcgcctggtggctctctatgcccttcgctatgagaagcaacccaacaacgcgctaccaattctccttgatctcctcgccacagcgggcgaagtctcaccaaaccgcgtaaatattatccccaagctcctcacctatcaccactccctccaagccccaccagtcgcaggcgggttctctgacctcttcgaatcaacctccttcttctccggcgcaagcaaccggttcaagggtcttaaaggcgtcgagaacgtctacacacaacactcccccagactagaagtgactctacaaaacctcatcaaaggccgcctgaaagaactgcaataccctttcctcgagggcagtggacacacgcgggacaaaccgcaagacatcatcatctttatggttggtggcaccacgtacgaggaggcgaagatggtagcgcaagtcaatgccagttccccgggtgtgcgagtcgttcttggtggtacttctattcataacagtacaaccttcatggaagaggttgatgatgcagtgggcagctggccagaaccaggaccttcgacagctgcgggacggctgcgacgggaggttggacgataattgtgttttatttctggtgtatatgggtaatgggatagaagtatatcaagtaaagcctgcaatgacagtcaatttcatcaaatctagaaaaggaaatagttaacggcaacttatttcggatttgtcgctataccgcgccgtagggacagaaaccccaaatgcggagattcatcttcctctttctcccctcacctgagccacaccatggagcagacatccccaaaaggaggtccctcctctccagcatcacgcgaaccaagacttcatctcccttcaacaaccgatcccccgggtccccagaaccccgccaaaccgctcgtatggctggtatacaacccctccctaagcaaaaaccccaagaaacactaacacacccccagatcttcggcgcaaccggccacatgggccgctccctagtaaaaaccgccctcgccaacaatgacctagtagcagccgtcggacgcacctacgagaacagccccgcagcaatgaaagagctagaatcagccaactgcatcggactcctatgcgacgtacgagcgcgagagaccgtcaagcgcgtaattgaccaaacaataacccgcttcggccgaattgacataatcgcaaactgctccggctacggcgtcatcggcgcctgcgaagaccaagatgaattcgacatccgcaaccagttcgaaacaaacttcacaggaaccctgaacatgatccagctctcgctaccgcatttccgtcagcgtcgcgcggggagatacctcattttcagctcgacgtctggcgcgctcggtgtgccgggcctcggaccatactgtgcatccaaatacgccgtcgagggcttgatggagagtatgctgtatgaggtggatagttttaatattaagggtacgctcgttgagcctggtcatatgcgtcgtgatgatattggggatttggtttcgccatctgcggtcgtgcctaacccttctgaacatcagctttcgtcgcccttgccgctctacggccattttctggttaagccgcccagtgagccgtataatacggttacgtcgccggcggcgcatgcgcgacgtatgctcatgtggctgggcgataagcagcctgctagtgcggtaaaggcggcgcatttggtttggcagcttggtcattgctcttacccgcctctgaggctgattctgggtacgtatgctgttgagagtatacgggatcggttgaagtgtattattgaggagattgaggattggaaatatctcagtttcccgatgggtgagactttgccggttggagggcgtgggggatcttcttttccggagggagctgaaggggggagcgaattgggtaatggataattttgttcgactttgtcaacgtcttctattatacccaaccctgatcaaggagcctcttcggaggacagccgacctgcattctccggcgtggggtttcctatgtcgtgggaatgcatgacccgctacagagcttgtctggattctatcagaacaagagacttgctatatacctacggatgtcgaggattaaggagcaaatgatatgcgtctacgtatactgcatggatgctgcacaccacgaaaaagtgctgctttcttggtaaacccaaacctatagctccagaattgctctctgcttcggccaacgttactagcgcggaggcagacaaccaggctaatgggaaagaaacccaaaggcattcactccactaaacagactcttcgcggggagccagtcggtgatttcttgaatttctgagatttcaccggctcgtgcaaatgaaccaccagggcgagtaggcggatactggcggttgatgcgaggagagtcactctagcaaattcatatagatatcgtgtatccagtaaaccatctcggccagcgcagtatcccgagctaggacggcctcatttgcgagttacggtccaagtagttgcaaactagcataatcctgaattgaggtcgttatgatcggctcagacaggcttgtaattatatctctcaaggctggaaggatcattctagagtgtgcattgggaatttccttcctggtcgatgcacggaggactcgaatgtggtactcttgtggataatgtgaaagaagtaatctgttgatgttagagtggctcttatgaaccatggcctgcgaaggagctagtactttgccattttggtggctttcagaaccactccatgagcacggcgctcataacctctcggttctaggaggctcatgggttgtgttcatatataatagtgatgacatcgtctaggaaatcctcttcttataaagtctaaacctttgtaggaataatgatggtaagagaaatatatgaagagggaaaagaggaagatgccatttatagccatttatagccacacaaggcatgatatctcaggcgttcggcataacctcctgtaaaagaaagagaaacaaagggagaagagaaagctttatgcaatacctatcaaaataatatacaagtctatccaagatagaaatagtaatacaaatcccacatcttataccaaggtatagggaactcagaaaacgacattgacaagtttaccccccttgatgacaataacccgccgtctcttctcccagtcattcttctcccgaagccacaacttcccctcagaagtctctaacactcgactgatgatccaatcctgttcttcctgcgaaggagaattcttgccctgcggcgatgctgtcaccggagactccatacgcggaatggtcacagcacagcggagcttgccgttgacctggacggcgaccgtttggccgccgcgagaggagagggtttcgacttggtcgggtgtgaggagggtgctaggccagggggatgaaaggatggatggcactggtgttgaggaggtggtatttgtgcttgcgtgtaggacttcccatgattcagaggctaaggctggggcaatgggggctagtagacggaggagtgatgagacagataggtataggatcagaggggaggaggcgggtgtcgaggccagggtgttggtcagcttgattaggtctgagatgactgtgttcagactgtaggggttgctttcgatgcaagtggtgacggatgcgatggtgttttgggtggctaggacggcgcctgcatcggagtcactcaggtcctggagtgatgacggaaggggggcggcatgggtggtagatgatttcagatctgcttctgagacggagaatgatgcctccgttagagtctgctgggtgtcttggacgagtttccagagtcgaccgaaccagcgctcgacgccgacgaccttggcttcatcccattctagaacctcgctgactggtgcggagaacaggatgtgcgcgcgagtagcgtcggcaccatattttgatgttgtgctggtaggatccacgccattgtacttgctcttggacatcttttcgaaggagatattaggggaagcttgtgttccctttatcaaaggcttgtctggattggtcaggtcaacttccgacgggagaaggaagcggcctgtcgaaggctcagtgaaggtctttccatggaccataccctggctgagaagcattttgaatggttccgcgggtgcagcagagtccctcgttgggagcagctcagacgagaggaatttgtaaatgaaccgagcgtagagaagatgcagaatggcatgctcgataccaccgatatacacatccactggccgcatcaccgcaggagagaacggggcttccttattagcatagtccaagaatcgcaagaagtaccaggacgagtccacgaaggtgtccatggtatctgtgtcacgtcgagcgggaccattacaactggggcattttgtatggacccattcatctgaggattccagagggtttcccttctttcccttgagccactctccctcgattttcggcagcttcactggaagatccttgtcgggcaccggcacaggaccacagtcaccgcagtggatgatagggatgggcgcaccccagtatcgctggcgactgatcaaccaatctcgcagacgccagctctcaacgaacccagcctgaccgacttgctccaggtcattgacaatcagttttgatgcctccttggagtgtaacccttggtactttccgcagagcgaattcaatacaccctcttgcgtgaaagcttttgtgtctgacgtcgggacgacgctgcttgcttcattgccacttggctcagcctcgataacaacagggatcgaatcggggttcacattctccttaaagaacatcatgtccctgttatcatggcccggaacgcccatgactgctccctcgccatagtcgttaaggacgtaaggagccacaaagacaggaagcttcctcagcaagtggggtgtttctgtatcaattttgcacaatggatgagacacctcaatgtcgggcagccggtatcctgctttggagtccggtgcaagcgacaaggaatcgctcaggaatttgcgaagtgcctcgtctttctcggcagccttcaacacaatagggtggtttaaagaaagtgctagatactccacaccatacaaagtgtctggtcgggtagtgaatacattcacatcgatttggtcacctccaccgatcgtcacagggaatgtgaccttggcaccgtaagactttccgagccaattgcgttgcatcgacaggacacgctccggccatcccccggcaagagaatcgaggtctttcagaagtgcttctttgaaatcagtgatcttgaagaaccactgcttcaggttcaacttctcaaccttagcgccagatctccacgagaatccattggcatcaacctggacgagaattagcgcaaatcaagttttgccctttgatcccgactcacctgctcatttgccaaaacggtcttatcaacagggtcataattaaccaacgcttctgcttgatacgccaaacccttctgatacaacatcaaaaagatgcgctgagtatgctcatagaagtccggtgaacacgtagccagttcctaagccacaagtatcaattagttatcttagcggccgaatcaatacttcacataaacatacccgatcccaatcaaaatccgccgaaatgcacctcaactgctccttcatctttgagatattctcctgcgtccacaccgcaggatcaatacccctctcaatcgccgcattctccgccggcagcccaaatgcatcccaccccataggatggagcacgtcatgtccgcacattttataaaaccgcgagatcacatccgagatcgtgtaaacgcgcaggtggcccatgtgcagcgtgccagacgggtatgggaacatggacaggatgtaggatttaggtttctgtgttgtgtcgggtgttgagcgcggcgtggcgcgctcgctttcccattttgcttgccattttttgtcaagggctgggaggtccagtcggcgggttgctgtgctggctaatcgggtaagtgtgtagactggtgagagggctcgtagggttgggcgcgtgtgaatgcggccaggcgcgacggcgctggttaatcggagtcgtgagagggattgcatggctagttggtcattatgtgtctaagatatgcttagatattggggtaattggcgcgattggtcatgtccgcgatttgaacgcctgacttgtctgcggatcttcaaaacttccccggagcccggatagctttagccccgatttggactagcgtatcaacgctattccagaagccctagatatgaagatgtcgagtcttttgtacttgcagggaattaatatttgggaatgtatttatgttcaatgaatatgcatatcctgcgtcgcaactctctatatattgtacactctactctatactaagtctacattctcaaaatatcaccactcctatcaatgccaccccggaaatgatccgcaatcactttccctccgagaatagtctcctcgacaagcccctccacatgcttgggctcaatacgaccgtaccaaatccccttacccgccagcgggtgtggctccgaagaagttcccactatcatcttcggtggtatataaataatcacattgcctgcgtatttgtgtcctccaacatgactgatcagaccaatattagcgtgcttagggccatccaccgtagtcccatcactgtctgcggaagtgaatcctcgcgcttgcaacacgcgcttgaactcgctttccaacgcgggggccatgagaccacagcgcatgtcgcgacctccgtgtccacatattaacactgttggagagtgattgatatcgataacgcctgggaagtgtgatgctagctccggggatcgggtcatttgtgcttgtttggttgcggagagagaggagtgcatgttgtggagtcgttcagggagaagatatgcgcgcacgaaggtcgtaaggtcggttgtttggtcgggcgatgaggttgtgttcacgggtattgagggaatgtatttgaagctggggaagaggaacaccgaggcagaggtggaggaggatcctgcagctggtgtgatagatgaatttgtgaccaagatattgttgaaaggctaaagcgatatgatcctgtataagcaagagcttgcgcattcattgggttagttgaaccacttacatcaagatatggcccgccacgacctagcaggctcttcaatcctctcacaaggttaccccagcctttgttttccccatcattctcaatgcgactcgtccagtctggctgtcccgtgcagacgagaagctgctgcgcgtaggcagccatcgtcccatttaaggcttgttcataatcaatcggtagatcctccggtagagcgggcgtgggcggacaattgcagcttggttcggggcatgtcttggtaatggggaagggaggggggatttctaggcgggcgcggagtctgctactgcgctgaggggtagacagtagacggattgtctggcagtttcgataggttcgcccgctccagtcgcgcttgagcgattgcacaagtattggtcgcattataatagatagaatgtatacaatttcaaagaacaaaagtcagaaaatagaaagaaatagatttgaatgtccgagcgccgagtccgagaaatcggagattcggagattatcaatcgccgccgctgattcgttgatctgcgcagattatgctgattacgtcataatacaatcctaacaatcgcaatgttcccaatcatcctcatcatcactgtcaatcaggatcccttggacaaatcgaccgacaacctgcaagaagtctcgcgtttgaggcacatcatgagtcccacagaatttgtaaatctcgacattaacgcaatcctttgctaacgacaaggaccgggatggatcaactactgcatctaaagatcctatgacatggagtattggttctgatcttggggtaatatatcggcgcatacgcagggtgtgctagctgaaaactgcttggcaaatagcaaactcgatcggggggtgatctagaaaatggaaatcataagtcacttacaaatagcggcgaagacccgggagtgcttactgtgagattgaagttgcagattgatactttcttttcaagaaggtatatgacaatagcagccacggcggcgcctgatgagaatcctttggtcccgataaaaggtccatgtctctcaagaatatcagaggcacgttgaatggactcttcaagagctttgatgtctctggatctccatcaccccaggcctgcttgtcgtctttgtgccatttttctggatcggctcgcagttgacctaaagggtaaaaaaattcaatgttgcttatttggcgattatggtcctgctgcagggttttgagcacggattgctccatatattgtcgtatgaatctagttttgcattagaaaaactgtccagaatggctgtgccctaaattgcatgggtaaactggctgcttggcttctacgggaaagacagaaggacagcgctctcaccatgcaacatgaggattttaccacatgatggggtctgatcgaataatatagttgagttcatagtgatagttcccagtattaaagggttcggcgatattctctcgagtgtttagatgttctttaatggggactctttgaaattaaaatatatattccaaagccaaatgcatatacgaaaggtaacacatagtctattgtgcaatgtaggtcgacatcaagtgcatggcgatgcttcttgtgttaacactatgcaatcaatgataggttcatcaaagttgtaatgttagataaagtccatttgcagcaaaactcgacagataatgtctgcatatttcccttctcagacaaatcattaatcatatgagccctatgttgcacaggaaatgtagactggatgtcattttgttaagatcgacacgcgggtatacaatgtacatcaatctttacatcatttgaaatatgaaaacacatccctggaatgcatcttcgtttctactattcattttcaaaatggttcaagccgatggaaggacttctgtcatttcttagcatccgataccgctaggcagctggtaatgactgaatgtgcgccgtatctactcgtgcaagcaagcctcccggtgtccccgctgcctggaatgatcccaaatctgaatttatcaagatgaagttctgtggcaagggtttgcaggttctgtctcttggactgtcagttatgaaaataggtgtattgtaagtgtgccgaatgagggacatggtattcctgcagttcaacctcgggactgtcgcgcgctatggctgacaaaagcactgatgccgtgcgagatagtcggcacatacatgcctgcgctcatcttggcacgcttgtcagattaatgaaaaaagacgcgctctcttgagtagtgcagagcgcaattattgtgtgcgtatatattggttattttgtcgaaggcgagtatgattgaggcggggaatatgtgagctcgacctattggtatgatccacgtgttgaggtccaggatgaagtgtgcgggaaatgggcttgcgattacttctcatggacggcgaaattctggacgaggtctttgtggaggaggcagttcgtcagttagtggatctttttgtccggatctaactgtgggtgtgttgaataaaacaggtgtcaatagatggttgtgcatgtacaatgttcgaggctttaaagactgtaactgtccgattttggaaggaaatcacatcacgattccatattgctggcgatagcacacggaggttgaggcgcatcccggaagttcgagggtgacgaatcgaactgaatggcccccgcactgatcatgcgataatacgatatgcgccgaagccccggaccatcgtctcacgtatgcgacttgtaacgaaatccatggcgactatgcagattaactgaatgatcaagatttgagtaggtaatttttgggatcggtggtgggttgcaacggtagttagcatatcgtacggcatcacgattctctggtcatcatttcaaagttcggttttcgacaacgtagcaatgcgatccactgcccgatcggggagcaactcgaaacatattgtgcttatcccaattaatttgcagtcctgtcaaagagaccaagtgcgctgcgaaaagatagatgaatccagtcttcgacctagataaggggaattaagaaatccacccatgctcgagtccgtctatgatgcggtcatgctttctgtgatctccatgatctgatccggaagctcatcggtggatctggtgcggatccatggatatttctccaaaacctcctcgcgaggaggcaatgtacattatgggtagctctgtaggggagtagcggggccggagttggagaaggtgacagggaggccgaatatcggcagaagtgcgggaattgttcggcatggctcctgaggaggatgccatcgagtgctggggaacttggagtgttttagtaccttgtgggatagtatttacaggagcctgcaggttggagatgctaattattgggggtcgactggtgtacggagtatctgagttgcgtatacgaaattggttgggtttgactttacccctcattatgtcagcagatatagttactcctcagcggggtaacgctcggatttctgatcggctgatgggctgatgggggagagatgggaagaaccaaatagttagtgatatggaatactacgatgaagatagagagagatattacgaggcatctgatccactacgagtgcgtcagttgtatgtgtaactgtatactacaaaagtgcccccgcacgttcacccattgagagctttccaagggttaagttatgcaatagtccatgggtgatagcatagcatataaaagtagaatatacacacatgcacatatataatatgcgatatgcaatatgcaatatacataatacctatacaagtggatatggcaagctacgcaagtccgaaaatgataggccatgaattcaaatcaatgtactccgtcctacattctgtcctctgtccctcgtgcggagagttctccaagtggattcgctcccagtttagtccgactctcccgtttctatgcgacttattctgaggggacaatgcttgtctttgtagcgagggggatatataacctagctccagttgctgttcggatgctttctttcttctcactctatccaactctcatctcttcaactctacctgtaagtctatcctttaccatcttcctattccactatttcccttatagtcacatcacattccctgggttgcaagattccccacttctccccttcagagcttgcaaccggttttctccaacgctgtttttggacgctgacctcatcaactatttataactatcgatctatacacgaatgtatataacggagcgctaaccttctttttagtgatattttgaatatatcttataaatattttatatttcttcacgatggtatttactcgctctcttacccgtcaattaggacggcccttcctctcgagctctctcaagccaactgttgcctccagttccttcgctcgggcttcaccgttggctggctatatttccggtgcacgtacactaaccgcaacttcaaacctccagggcaaagttcttttggttctttacgatgtaggtcattctcacttcatacttcctatacttcaatcgctgacccggtcttgtttgtgatatagggtggtattcactcccagcagcagcctcagctgctcggtactaccgagaatgagctcggcatccgcaagtggcttgaggaccagggtcacaccctagtgaccgcctccgacaaggatggcgagaactccactttcgacaaggagctcgtcgatgctgaagtcatcatcaccactccgttcgtttctgatgtgcattattttaaaaacctccactgattatataacagcttccacccaggttacctcaccgctgagcgtctggccaaggccaagaagctcaagctcgccgtcactgccggtattggttccgatcacgttgacctgaacgctgccaacaccaccaacggcggtatcaccgtcgccgaggtcaccggatctaacgtcgtctctgtcgctgagcacgttatcatgaccatcctgatcttggtccgcaacttcgtccctgcccacgagcagatcaaggccggcgactggaacgtcgctgccgtcgccaagaacgagttcgatcttgagaacaaggtcgtcggtaccgtcgccgtcggccgtatcggtgagcgtgtcctccgccgcctcaaggccttcgactgcaaggagctcctgtactacgactaccagcccctctcccccgagaccgagaaggagatcggctgccgtcgcgtcgacgatctcgaggagatgctcgcccagtgtgacgttgtcaccattaactgccccctgcacgagaagacccgcggtctcttcaacaaggagctcatctccaagatgaagcccggtgcttggctcgtcaacaccgctcgcggtgctatcgttgtcaaggaggatgtcgctgaggccctcaagtctggtcacctccgtggttatggtggtgatgtctggttcccccagcccgcccccaaggaccaccctctccgctacgccgagcacccctggggtggcggcaatgccatggttccccacatgtccggtacctccatcgatgctcaggtccgctacgccgaaggtaccaagaacattctcgaaagctacttctccggccgtgaggactaccgccctcaggacttgattgttcacaagggtgcctatgccaccaaggcttacggtcagcgcaagtagagagccctgtgtgattaagtatgaagtattctccgggtgagagacttcgtttcatatttcttgttctttattcgagatgttcataaaagtcccaattgctcccgatggcatgggcaatactgaaaataggtagcatctttcacgataccaatgaataccatttccaagctttccttgttttgcacttgtctttgaaatttcttacccaatatgtaatcgcgaacaggttgtttctttttttggacgacgttgcttacttcgccgtgcaaaaagcatgggaccgagacacgggtgtcactcctccatgaccagtcgcgtgacaacaccctggcataagagtgtccaagctccttatatggaggaccagggaggcacagagagtcaccgaggcctccctttggttccacccaggttcctttcatcttaactttatgttgaggtggttactgactctctgttgcctacagtctgacgtttggagttgctgggcccttcggcgctaacggtgcccgcgattgttgcgagcaccgaccgcccgggcactgccagcgtatgactaagcagccgaacatgtggctcagtcagtctaactaacgccacggaacacccacgcctcaaaacttacataaaccactcccgctcaaacattcgaccacgtcccctcacttctccactttctactccacactacggaggcctccagccgccatgggtgacttaattactattggtcaatattgcctggcagaaaatcagtcatacactcaacttgattcctcggatcgacccccctaccattatactctttatcattaactgctttataataaattgctttatcaactgctttcattaaatcaaggagttatagggatcagataaaacatacgaatttttctaattaaaatgcatgtttatttctatacaatttcaaactactccgtagaatgaatgtatgtagtggtagaacatatggcagaatttcgtattgtacctgattaggaaagcggtagctggacttctaggtatttcaaggtacccggttcttactaagtaacctaatccccattcgggtattaggttattacggactaattaggaaggcggtactaaaacaactcaggtataggggtataagtaacaatcccctaaattaattctatcaccaccaataatagagatagtttaattcttcatgttgacaattatcatctacgaagtatgcgtgtatcaattaaagaaggcggagagaaaagcggtaaagcagttttgaccaatagtaatttagtcacccatggctatatctacctccaatcatcctaaaatgcctgtcagaatccctcaatatttttcttgttttagccccgctgctcgccgttgggtacccgtggcctcacggcccatccagagtcccggggtgcaaagctcagcccaaggaaacactcctagatctcatttcaacatagtctcttggaacattgactactccagtagctatcccacacgacgctgccttgatctcatcaaccacgttttcaaatatggagttcctgacattctctgcctgcaagaggtcaggtccgaagttcgtgccagtctcttaggcaaccgcgaaatacgccaagctttcctcacgacagacgccgcgacggacctagagtacaagcgtttcataaccatgaccctgctgtctaaagaacgcttcgcgtatagcctagactcgaaggagatgggtggatcaaacgatgaggggaagttcattgtcgggccggtttttcgcgagcacctcccgagtgcagccggtagggatggactttgcgtggacctcatccctccttgcgcaccggacaccttcctccgaatcataaacgcacacctcgagtcgtgcgatggcttctcctaccgcgctgcgcagctcaagcaactttctagcgtccttcacgaacctggctgcagtggtggcctcattgtgggcgatttcaattcggtcactgatgacgatcgcctgcttatcgaggagaacaagctaaaggatgcatggctgacgttgcacggcgatacgaagccagatgcacctacgtggagtgtggggaggaggagggaccctaggtacgagcctagcaggctggataaggttgctatggtaggattggaagcggagatgatggagcttatgcatcctctctgcatcaacgccaccaagccgtctgaccagattgagtggagtgaccacagtggactgaggtgtaagttttgcgtctaaatgtcgttgagcaagatggagatacaatctgcccacgaccgtgaggactccatgaagggaatccgtgacttcgatgacattatgtccctcataaatgccggcgacaatgtccaatatactcccaaggaaagagagaagtacaagagagcctttggggaattcgtcgagacctacattgagcagaaccccaagtggaccctcgctcagtggaagaagaacaccaatcttgagtaaggattcgatggcacactcattgtaactccgtcttcctgggtacgtcttaatgattcagtgcatctatttttctcggatatcggatggccttacgccccattatatcgctagcaacaaatcccaaacatccgtccataccattcttaacatttccttggctctatcgtgactttcctacgcctccctgatccggcttgagcttacatggaagcaatgaattcactggttgtggccgtgtccgtctgatattgcctcccttgagtgaatcaactcgatacttcagtggatgctgagccagtagagaccgtgattcttgacacactgtgcagataacgagaaagaaaaaggttgaaatgttcttattaaaaagctcaccgaaaaaagaacgcgataatgcgcctcaccatccttcaaaaggctgggaccaagacaagtagcatccacgtgagggggaactgtcgtctctgcgagcatccaatcagctttattcaattcctctgaaagtgaaccagcacagagtcctggttatgcattcgagtcacagcatcccttcgctcatgaatagaaagcagaggcaccatgctctcggagtcctcgatctgctccggtgtacgttgctggtctttaggagaggctaccatgatgcctgaggatagatgccttgagaaataatctcaataatttcttgcatgagtcaggttaataagcggcaaccctaagggggttttcgcttgagcgaaaataactacaacatcgtatgttatgatatgcagagcatgaggatcggtggagctatgtcgatctcaccggattaattgagtccagcccttcggtggagtctagaacgtgtacggagtagagccgatgtctttttttagacattcttgatggccaagtatgattggtagcagtagggtctaaatatgtatatgctatcaatctataactacatacaagtacaaaaaaggacaaaataactctattcacaaactcgccacgcttgaaacaccaaacctgtgagcccagatcatacaggcctgcaaaacatccatagacaaaagctccaaccccaagaatgcagatatgtatatgtgaacgtgatcttcaacgtttcaaagcctccctgcccgtacattcccatgcccctcactcccctcctcatcactatcatctataaacccctcctctaaatcccgacttaaacgactatccgtctcagccccggtatcacgtctctgttgctccagcgcaccccgcctcatagaatccctatccatcccaaccaagatctccccttcctcgtcgtcaatactgatcgtatcgtggtcggctacatgcgcgccccaccgccaccgagagggaaggaagaagtgcatcactttatcggctatgcggtcgcgtagggatagtgtatgtgcggatatagtatgtagtgggagatattgcgagtagcgctggtggtagcggcggaagaaggggattatgacgcatgaggctaggatgtagattgataatgcaattgcggctgggatgaggattgtctgtatgtgggttggtttgtcagctttgtgttcttttaggtcttggtcctagtcttcactcttggtcacggagtaacggtgatgtgtggcttgcgcgtcggaatagggggttttgtacacaccttggcaaagacactggttgatcccatgctggatgctgggaattgggcttcaaagcgcacctcagagtcgatgatagagtggtgaggtttgagggttccaaggtttgcgcgagagattgcggagcgaggtccacgcggcaggatcggcagatcgacaaacgaacggccattcgggatatcagagatgtcacttttgttgatattttttgatatatcacatcattaccttattcaaatagtatctgcttcgtagaactagactacctgtatgtaactaataatagtacataaaggctaactaatgatagtagtatataaagacactcttaatgacaacatatagttagttatgaacatctatgccgatgagtttacctatctaataggtagtctgagtctcatataacatgttctcttagctcattcactgttcattcccagatctcctttacgagcctatcattctttctagtatacgtacgcatttgctagcaggcgccaacgggctcgtagtgttcatagcttttaatatggttaaaaatagccaccccagctggttagcgctattatctatactaccagactaacatataaagatcgtaggctcacatgggtcctacactaccggacttaaaaagccattcaagttacctccactctctcttttactccgaacaaagaaggagtgtaaaagaaccggctatgtctgaggtaggtgccaaatgaagatgtatatcaggaatagatatagtaaatagtgagggacttgttctagttagcttacaggatgaactatggacatgcccgaagtagtttagtggcagagtatgtacctatcttctgcgagactacacacttactgatcttcatatgatgctgacatatggctggtattatggcttagtatccacgctcaaccaacactgaggtattttctctttgaagctccgttcattccggtccagtggacgtcgaccttggaagggtccaagtataagcttacgtgatcttgataatcacgtgcacggtcggggagtttctccgggaagccccctaatatcaatggaacgattagaagaacgctcgggcttcgatcctggcgtcaaactggacttgacatttgcaaaaagcttgcatgttcatctccttctctcctattttgctttctttgtggggtacgtgccgtgaaggaagccccttacccctcagtctctcgcgcctccgttgtcgcaatccgggtatactaactagcactagccagggagggacaaaacagagagtaacagagagccactttcgcccactttgaatgtcatcatcttctccgatatcccttgcgatcgacagcgccttatcgcgaaatagggcatccctatttaataccgttcctgagagtgttggaggggcccttatgctgcgccctgcctcatcttattgacgcccgccaaaatgcccaccagttcacaagccgacaaacctaagcagacatcgagtggaaagtcgttcttcggacgaaagttgtacaaagagaaaccgaccgaggaacgatatgatagttatggagctccctacgatggcctggcacctccgggaagcgcgggctcacgctcgtcccgccattcgaagcggtcttcgattcaatctgtcgacatgacccaggatttcgacccaagcaatatcgcacacacctcaggcgtcatcacctccatcccctttgaaagcctccccaccgataccaggaccccaattccaatcgataacatgtctcgccctagctcatcgcgccacgagccttcccccaaccatctgggcaaagctggaaatgactatcatcaatatcccaccgtgacctctacctctgcgccaaatgggtacgtcccatatcctggacctcgtgcgcacccgcacatctcgaataacaccagctaccccggcagcaaccccggcgagcgaggtgccagacaacaacagcagcagcagcaacaacaacaatatcagcagcagcaacaatatcagcagcagcagcagcagcagcagcagcagcagcagcagcaacaatggggacggccaggcagctcatcagcgaacaatgggcctaaccataactcctattctattgattcgtcctctaactcccgcacctccctcgaccaagccagcatctattcctccgtttcttctaacacgcgcggttcaagctacttctcctcggacaattcctctcgcactctcacaacctcgcattctagtgaccgtcccgccttgtttcccagttccagctcgggccgtttgtcaaatgcgggatcctcccaccagatatctgtaccggccgctatcccccggccacaagataactacctgactcgaccgagagatgaccgcattgtggatcagctctttctagagctgatgcagaagcgaggatggcaaaatcttcctgaacaggctaaacgacagatgttgtcgtaccctgcttcaaagaaatggacattggtgcatcaggatcgcttgacagagttgcaaggagagcaaaaaagacggcaaaatgcgcgacaaactcacggccatgacggcatgtctggtttgcttgaacgtgctgatgaagaagggagcccggaatggtatgtgaagaaggtgatggatgacaccattacgtccaagcagcttgctagtttgagtgtcagcttgcggacacagccaatcaggtatgcaatacccccttttctccatatcgtgcgtatcactaataactaaacagctgggtgaaagcctttgttgaagcccaaggccaaatcgctttgaccaatgtcctcttgaagatcaacagaagaaaagtctctggtcctgtcccggctccccctacaggcgataaagatctagaccgagaatatgatattgctaaatgtttgaaaggtctgatgaacaacaagtatggcgcagacgatgccctagagcatcaaaatgtgctagttgcactcgttagctcgttatcatcgccgcgcctcaatactcggaaacttgtcagcgaagtcctcactttcttgtgccactggggtgatggacaaggccacctaaaagttctacaatcaatggacaaggtcaaacatgatcacaatgagaccggtcgcttcgatgcttggatgcgtattgtcgaggtcaccatcgacggccgtggaaagatgggaagtttggtcggtgccagcgaagagtaccgcagcggaggaattggcatggagaacctcctcatggagtatgcagtctcaaccatgatccttatcaatatgctggtggacggagcagaaacggacctgcagctccgttgccatatccgcgcccaattcacatcatgtggaatcaagcgtctgttgacgaagatggagggattccagtatgaggttatcgacaagcaaatcgaacgtttccgcgataatgaggccatcgactacgaggaccttctccagcgggagggcagcagcatgaaggatagcatcgaaggcgaagttaaggatatgagcgatcctatgcaaatcgtcgatgcaatcacgtccaagatcaacggcagccgatcccatgactacttcctctcggctatgcagcatatgcttctcatccgggagaactccggtgaggaagggctccgtatgttccagctcgtagacgccatgctgagctatgtggccatggaccggaggctgcccgaccttgatcttcggcagggcctgaccttcaccgtgcagagtctgctagatcggctgcacacggatgctgaggcaaggcgcgtttatgacgagtctcttgaggctcggcaaatcgccgaggctgccattgctgagcgcgacgagatgcgagcgcagatcgagctcggtgcagaaggcttggttttgaaattgcaaaagcaaatcgatgaacaggctggtattatcgaactgcaacaaaggcaaaatgaatcgttcaaggccgaggttgcagaaatacaaaggctgcgtgctcaggaattgcaacgcaatgagctagaaacccgagaactatacctcatgctccgagatgcccaggatatcgccgcttccaatgcccgaaagaccaacaaccatgatatggcagaggcggcagatccatcccagatgcccggtatcatggaccgcgaacgactcatggaacgtctagaacgccagcttgagcggacaaagacccagtttaagctggagggcaaggtctggggccagcatggaccatcagatcgactccgcgagctgcgcgagaagatggaaggtgaagtagatgacagtgagtactttgctgagtctacccgccgacacctcgaccctggagctttgggatctgtttaccgcaagcgcagccatatccctacgatggactcgactttggaagacgaggaggacatcccactagatagcaatggcgaaccgatgtatgagaggcctcgtctggtggaaatgcatcgtcctcgtttgaacgctgcccagactaccggcttcctaggcgagcttgcttccaaggttcccaggtttgaggctgaagatcccgatgttgttgaaggggaacaggtacccaagctagaagataatgaagctgctacaaaggctatgccacctcctcctcctccagggggcaatattgttcccccgcctccgccgccgccgggagttatagctcttaccccacccccgccgccaggaggcaagattcttccccctccacctccaccagggggcttctctctcccacctccacctccgccagggggctttactcttccaccgccgcctcccccgggtggaaaaattggtctacctcctcctccaccgcctggcggaatggctctcccgccgccccctccgccaggtggtgccaagggtgttcctggattgccgcctccacctccgccccccggcggaagagttggcgtgcctccgccgccgccccccggtggtggtggtttcgctcttccaccacctccccctgttcctggagccaatggcctgatgattcccccgcctccaccccccagcgccgccttaggtacaggctggagacccgcatacatggttggagatgtttcgccgtctacaattcacatgccattcattcgacctaagaagaagctcaaggctcttcattgggacaaggtcgacactcctcaagttactgtttgggctactcacgcaccgacagctgaggcgaaggaagaaaaatataccgagcttgccaagaagggtgtactggacgaggttgagcgattgttcatggccaaagaaacgaagatatttggagccagcactggtgcgaagcagcgcacggccaagaaacagattatctcgaacgatctatccaagaacttccagattgctctgtccaagttctctcaatacccggccgaggaggtcactcgcatgatcatccactgtgacaaggagattctggataacagtgtcgtcatggacttcttgcaaagagacgaaatgtgcagtataccagagaacgtagccaaacttatggcaccatatagtatggattggacgggccctggcgccgctacttccgatcgcgaacaggatccctccgagatcactcgcgaggatcagatctatctctacactgcatttgagctcaatcactactggaaagcaagaaacagagcactcgcactgacccgcaccttcgagccagagtacgagcacatatccacaaggctaaaggaggttgcacgagtcagcgagtccttgcgggactctgtgtcattgatgaacgtgctcggtctgattctcgacattggaaacttcatgaacgatgccaacaagcaggcccagggtttcaagctgagctccctcgcccggctgggtatggtgaaagacgacaagaatgagactacctttgccgatctggtcgagcgtatcgtgcgcaaccagtacccagagtgggagggcttcctcgatgagatcaacggtgtcattggtctgcagaagatcaatgtcgatcagctccgcaccgacgccatcaagtacattagcaacattaagaacgtacaggccagcttggacgctggtaacctgagtgaccctaagaggttccacccacaggatcgcgtcagccaagtcgttcagcggtccatgaaggacgccagacgaaaggctgagcagctgcagctctaccttgatgagatggcgaaggcttatgacgatattatggtcttctacggtgaagacaacgcagatgagaatgctagacgagatttctttgctaagttgagctcgttcttgatcgagtggaagaaatccagagagaagaacacagctctagaagaatccagaaggcgcacagaggcatccctcgctcgcaagcgaatcaatgtcaacctcgccaacagcactcccaccgcagagacagtgcagtcgcctgcttcaagtggtgccatggactcattacttgagaagttgcgtgctgcagcacctcaagccaaggatcaacgagaccgccgccgtcgtgctcgtctaaaggagcggcataacgtccgcgtaacttcggggaccaagccaccacctgattcgggtgaggcggaagaaggcgaagacggagttgaaaagacaaccaatggcgataataatgacgagaccggtcttctgagccctccgagtaccgcgccggaagatggcaagcaggaagctcaagtatctgaaggcgaagacgttgccgatcgtgcggccagcatgcttctcggtctgagaagtaattccgatgcaggcggcggcgagcgccagcgacggagaagagagagcgcagatgaagagcgtcgtaaccgccgcatgagacgccgaaaccccacaggcgggagcaaagatagcgcggatggctctagtggccttgctacagttcaagagcctgcttctccttcgcagacagactcgatggccacagacgatcaacaaccccccggctcacctaacgagtctcaacctcccccttcaattgtcgtctcggagcaaggcgagtcatcacaggatccctcagttgccggttcctctcctcaaaaaccaactgatttgtcggattaagtcaatcaccgacagccgatttaatttaatgttttatcaattctcattgatgatgcattggattcaaacccaaatgttctccattgccatcaataccactacttactacttactacaaccgccctcgattgtataatacccattccctacttacacttctactctttgagctgccctccttgatttgacgagccgagcatggtgcgatgatacaatttctttgtttcttcttttctgtttcatcttaacagtatcccttcatgtgcaatcattttctcttttctttttgttatccactcccgcatacccaccgacaccctgtctccctctccttgtacataatccctttccccccgtcttcttcatccaacactacctgccatggaaatgtcgcgatgattggagggcgtaccatcgaattgcatgttgagctcgatgttcaatgtttcctgcattgtcgccttgttctttactccctacttccgagcgcatgtcgtggtcaagttttatatctgctgcgtatccttgactagagccgcattagatggactgctattgcttgtgattttcaggatcagaatttaaagactcgcagttagacaaaatctatgttctcgatctcttccaagctctcgattagcatgtatggctcgtgaaggcggtgatagaggcggtaagatagtgcccgatcctcagtcgcccttatcgcaatataaacatcggaccaacatttgaacatttgaacaccctcggcatctaccaatatttcattggtttaatcttgcgcatgcgagcatctcgccaagttctgcgttgggtctctcccttcagcttgccaacgagtcaaccatggcaaattatatcaaataaatcatgtatccgacgtcatggctttctctccgaatcgcgtggctgggctcccggacaagctcgagctttctcgtctactcgcccagctagattcatgctagatggagactctacaatatatgcgctctctactgcaactggacgagcagccattgcagtcgtgcgtgtatcgggtccggcatgtgcctcggtatgtattcctcgaagaactactaaagcaccagactaacaatgccattcagatatacaagagtctctgcccaaaccacccgcttccaaaaccgcgctatgcagccctccgcaccctctatgacccaacccaacccccaaccgcaaacacaatcctcgatgccggcgccttagtcctctacttcccctccccacgaaccgcaacaggcgaagacatcctcgaactacacatccacggcggccccgcaataacaaaagccgtcctttcagcaatcgcacagacaaacaccccagagcaaacagtgcgctacgccgaaccaggcgaattcacccgccgcgccttcatgaacgaccgtctcagcctgcctcagattgaagcactcggcgacactttgtccgccgataccgagcagcagcgacgactagctgtgcgtggctccagcgacgcattgctgaatcgatacgagcggtggcggcagggtctgctgtatgcgcgcggcgagctggaggcgctgattgatttctctgaggatcagcatttcgatgagtccaccgaggagcttgtttcttctgttgcggcccaagtgcgcacgttgagcgtgcagatcggtttccatattgctaatgcgtcgcggggcgagttgcttaggaatgggattcgggttgcgctattgggtgcgccgaatgctggcaagagttccttgcttaaccgggttgttgggaaggaggctgctattgttagtactgagcaagggactacgagggatattgtcgatattggggttgatcttggaggatggtattgtaagcttggggatatggcggggatccgggctgagggtagctctggtgatggtgagggggttgttattggagccgttgagaaagagggcattcgccgggctagggagagggcgttggagtctgatgttgttattgtggttctttcgctggaagacactgccactggcgtccagctattcgttgagccggaggttctgggtgctgttaatgactgcgtggaagcaggcaagtgcctcgttgtggctgtcaacaaatgcgacaagctacacactgccatggaaagtggtgtgccgcagtcattgtcagatacgatccacgacatcttcccttcggtcccggtagaccgtgtatttaccatttcctgcgaggaagcccgtcagggagcatcgtctctcaataccactacagacccgggtaatctacaggtctttctacgtggactaattgcgacgtttgagcagattgcctcgcctcttggcgtgggcggagatggaggtcaatatgatatctcgtattgggaagattctctaggtgtcacgcatcgccaaagctctaatcttcaaatatgtctcgatcatctggacgacttcctatctcaagcatcttctgctgaatgtcatgatagttcctcgcgcgagagagaactcggtcctcttgattcccatgttgaatctgaagtcgatatcgtcactgctgcggaacatctgcgctttgcggctgatatgctggctaagatcacaggaaaaggcgagagtggagatgtcgaggatgtgttgggggttgtctttgagaagtaagtactggagggtctttgtcttggtttgctggtctggatggcgagctgactgtcgtagattctgtgtcggcaaatgaacattccgattcaagtatggctccgacgaggttgacttgcatcgccgtcttatgatagcttgcttgttcggcaagagtcgtgacatcaaccggttgctggttgcaattgacatgattgaaatggttgctgggagtgcattgtccatcatgcacattctggacggcctaattttggccaggcaaaagcttggggcaagatctgctggcgggggcattgtatcctcctcggcccatggcgggaaacatcatgacgaattatttaggcagagataactgctggatcgcttcaaagtggtagacgggaggtgacgggtggtgatgtgttgatgaagttgcaagaaccgatgcaattgtgtatgaatagcagctcgatagactaataatgtatgcaatggtaacctaagaactaccaccaccgatcagcaacgcgatacttataagaaactaaagggaatcccaaaattgtctgccttggttgccggggtctcattcatcatcccaggcacccagaaacggactcttcgggtttatttccgaaaattagccaaaacactcctaatgtccttgtcaaagacagaattctgtcaaacatgaatgatctttctgagtcaggaccggatacagtctccgcaaagtactgaaaatacctggcgtgtctcagttaggccagatgtatccgatgccgaaagacaatacagcacgccctaaattattatattgagacttgggagctattcttgtcatcctagatgctacggtatcatgaagaattccaatgctgaggcaagcttcagctgtagccctgtataaggccgagtttgaggttggaacatgcttcctgggtgtcgatcattgtggttactcgcatctaagaaatttctatatttgtttctttctatttctatttccattggctatttctctttattcgctattcgactaagatattgtcggagtttcagtgtttcaattctaaaactcctgtcagatctaagaatagcgggatatctgcaaggaatgggattccttctagaaggactatcgtccaatcaagaatagaaagtaccaagagtaaaatagaaatgccccgagaataaaataagaaacccacgttgtgctgcagaacaaacatcatctctttaccctgtcatcggggctgacaaggaagtaccttgcagcctcggacaacaatgtaactggactatttagaccccaattttggcttaagagaataaaaatatcctttatactgtctataataagctaatagtctggtaggggtggtgtagagtataggccagataaccaccgatgtctgttgtgcagaatattctatgaatagcttcatcatccctgtctgtccatatggctttttcatatagggtgattagttttgtctggggatgcttacttcttgctaggagtttgttcaacccttggtttttgtttgtttctttcgcctttctttgtgtcattctagggctttttcatacatatagggcactttgacagttgatcattctacagagccttaccttggagagtgttctgtcaatgacaatactgataaacaaacaatacgaaatggaagaattcaaacattaagtatgttatttggcgacgtaagctattccacatattgcacgccattcccttagtgaaccagaaacaaaccaccacgcctcaccacactgtagcctacttcttctccctgaacaaacgaaagctctgatatctcctctcccttctaaaccaagcagcccatcacaattgcaatgaggttgaagtattcatgacgaaggaaatcaaaagtggatgtagtccgagccaggacactcatagtattcaacgtaaaagtcacggagagctcctagacactcagagggattgagcaagtatgagcaagaagggctgtgttcggcatggtgatagaggtaagagacctgaggaaactgggcacggcattggaagcagaagaagggattttggtcggtgagtcggttgccataaaacccatattcaggagactcgaaggcgagagtgcggatgcggtcctgcttcacgcaacggccttcttcgaggtggaagaggaggcctgagaacccgatccagtttgttgggcaaaaccagcattcgtagattggaagacccagaggattgttacggtcttgttgtgctgtagggggatgatacatgatggatgtggttgtggatatgaagtagattgatagaggatagatgaaggatgaagaatgagggacgatgatggaagaagcaaaagcagtggaagagtgaaagaggaagaggtcgggttctgtttgttttatagtcagagtacttgctattttgggattcggtttgctgcatgtacatccctattttgtttcccttctctgtttattcttagtctcagataccctctctagattattgcatttgatattgatatggaacttctataccaaaagatatatttcacagtcattgggagttatggctcaattgaacaaagacaagccagtttgctatttacttgactatgtcaagaccaacaatgatattatgaagacaaaccctacttaattacagtgttctttaaagcttcccacctcgcaagcacaatatcagaactatccgatcacagcgccgcgataccgcaacgcaaagcgaccagccaaccacatcgatcctacaactgcagatagagccagtccactgacagcatagagatcccagttcctggctttaaaggtagacatacgcatatcagccgtctgcaggtgcatcgggcgcaattccttgccgtctttgaaccgtagctcattgtcgtacatgagctcctcgataagatcggcggcatgatacttacgacgactagcaacattagcaatacgctgtaggcgaagcacattccggctgtatgtctcgttttctgatttgagaatcttcatggctttggtgtagacctcatctgatgtaaagttgagtttactcaaagactcggcgacacctccggcgaccagccgagcggtgttggcgatctgatccgagaagatacccattgataacattggctttccatggtaaagaccctcgttagcactagaacctccaccatgggtgaagtagagcttggttgattcgttgtcgaggatagcacgttgaggtgcaaaaaaggggaagatccaattcggatgtttgttgtcaagtagatcccctagggtgatttccatttcatttttatcgcctgtgttgaattggaaggatgcgctagcaaggttttagccgtgaggagagagatttgattctttaatggtagggtttcttacctgcggtcaaggtctgctcgacatgtcttgcccatagcccagatcacaccatcgatcataccatcctcttggaggcgattcgcggccttcactatcttcgcagcatccttatggggcaggatgatatgagtaccaagggcgatataaagaactgatttatgtctggccaagaatggcccgcactgttggtctagtggcgggtatgtcggactcaagagaggaccaacaggagcagcagttggaggtagatcgcgggggatttccagcccgaagaaggagttgacaaatatgagatagtctggtttgctgggcttatgaggcggatagaagacgccattgtcgcttcgcatcttcttgctccattttcctgcgcgtacgatagctggtagatctggaaaaaagaagatctcgttcatgattcgtagccacatggaagtatcctcggatgtcatggtccctggaagctggaagcctggctggcctgggatgtacgggcagggcaactggaataaaggcatattgggacagatgatggcgattggtaccttatactcaaagtgaatatcgttggctgcctcgacaaagaaatccgcaactatcatgtccggtcgagtcgcagggtcatccatgatctctttgagacgatggtaggtttgaggccagaaggagtcgaacatgtatttggattccatagcttgtccgacacccttggagatatcccatgcctgcatacgccgatagtgaccatcgagttgctcgggggttggtccggggcctaactgatgaagcttgttgacaaagtcatactcaggtttcacccagctctcttgtccctcaagtgttgcaaattcaatttcgtggccacgctccgcgagcacccggccaatttccaaaacaggggctgtataggttcttatttagtggtctatctgttcatgtttcatgttccatcttaccggcatgtgtgaatcctccggtagtaaccaccagcaatatctttctagataaatgtatttgggactggctcattgtgagaaatatggagaaatcaattactttcactaaaaacttgacagaaaagagcgaagcacttatacctcaagccccgaaatggcccccaaactaacatcctcaggccatactacggacttcggagagtttcaaacaaatcccgccgagtatagacttgataattgaagattcactggagttaacaggcaagtccagagagctgaacgatttgaacattcatgctttaaaatgatatcccataatggttacgggctttgtacatgtcctaactagaatgacaagttgctcacaaaaacatcccacttttcgaatcctcaaactgacatagagagttcctccccttttgaggcacatggaaataagtaccggcagtcctaggccctttgctactagctaggcctgagatttgacactatacatgcatgatgcaagtatgtaacttcaaaggtggcgagacaaacattacaaaccagtcacctgatgatgacagcatgtgactctttcgccgatatcggtcatggtcttcatctttcatatctcaactacttacaacatagaggaagaagagacctacgaaaagagcaactgggtctaggaagagaagaagagtttatttcatacttacttcatacatgcacctttggaagacaaccatttcatactatacaaccttgtatatgtcgatcaaccccgccattctcacgttgatctctcaaatagattatatcatagacaattggaaagtgagatgggtttttgatatgcctctactacgtacctcgtcagtatcagccatataagccatccaaagaaataattcctcaaccaagatcgtgactcaatggcgcataccgaattgactcataccccgccattgccaggattgacctataaaacattcaattgaacgtgtaatgtagattcggtgaatatatcagactgcacgttggaattccagtaaatcctgttgttggaacatataaatcgctatatcttctcttactgtccttgcaaggttgatccactacggtccacaccttttgaggtttttctctcccgcttcttttctttctcttttacatcagtccacctcaattaatctcactatgccttcccgacaagaagtctcctactttggagctggtccagctcccctcccgacatcagtcgttgaagccggcgcaaaggcattcgtcaacttcaacgacgtcggactcggactcggcgagatctcgcaccgctcccccaccgccaacaagatcctcaacgatgccaaagccaacctctccgctctcctcgatatccccgataactatgagatcctgttcatgcaggccggaggcagtggcgagttcagcgctgtcgtgcaaaacctggtccccgtctggattgagcgccgccgccgcagggctgaagccgacgtgaagaaggcacagcccggtgcggagcaggctcaggttgacgaattggtcttccagagacttcagaaggaggtcgatgaggaactcaagctggattacctcgtgactgggtcttggtcgctcaaggcttcccaggaagcgagtagactgatcggctcgaaatatgtgaatgttgctcttgatgctcgcaaggccaacggagggaagttcggaaaaatccccgctgaggatacctggtcattgactcctaccaagaaggagggcggcaagggctctgcgtttgtctacttctgcgacaacgagaccgtcgatggtgtcgagttccagcagttccccaagtcattggaggctcagggtcaggatgctgaagatgagcgtctcgtggtcgccgatatgagctccaacttcatcagccggaaggttgatgtcagcaaatacgcggtcattttcgtacgttgacttcaatctttccgcgtcatgagtgtagtacactaacaatatatacagggcggcgcacaaaaaaacattggtgtcaccggtatcaccattgccatcgttcgcaaggatctcctccctccccagaccgcgactccttcccctgctctcctccaccggttgaacattggcggtcttcccggcccaatagttctcgactacgcaatcaccgcaaagaacaattccctctacaacaccctccccatcttcaacctctggattgccggccaggtcatggccgacctgatggccgagttcagcgctcaaaaagttagcgggcaagaggaagtagccaacaagaaggcagagcttatctacggtgctttggacaagttcccgcaagtgtaccaggttgttcctgacgctagcgtccgcagccgcatgaacatctgcttccgtgtcagcggcggtgatgatgcaaaggagaaggagttcatcgctggcgctgaaaagcgtcttctccagggcctcaagggccaccgtagtgtaggcggtatgcgcgccagcaactacaatgctgtcccattggagaacgtgcagaagctagtaaagtacctcgaggactttgctacagcacagtagatccgtttggatataatatcggtgtttgagcgaatccaacctagggcttttggccaggaacgtgtgatgggtaacgaaaaaggacgccagaatgtgtccaggacagttgcgactgtttattcaacataactcccagtatatccatgctatatatatgctttaatgacaaaaatgtttcagatgttggtacaaaagcccaagagaaagtgctcagagcttccacacagcccattctttgagatcaagctccttgatgattccttttagggggccctggagctcctgaccttgcgcccacagcttaggcccagccatgtagctgatgaacccctcaggaccagaaaccaaaatcaaattgctcctgcgagagttgccttttgacgctggtgcaatagcacctcggatatcttccttcccaatgaacgtgttctcctcgtccagataataatccacaataacctgcccgggatactgggccttgagtgcctctagctctcgcacaataatagaagtttcttctgttcgtacaacatccacaggcttttccgaagtattatcccgactcttcgagccaaaccacccagagaaccagccccggcgtgactgcggcttcagcgagtcactatgaccaccagcacagtcatcctttatccgattcgcccacaagatatggatcgtcggtcgatgttcagtatttttgcgattcaaaagagaatacgcagcctgcagagctggcgcaatccccgtcccaccagcaataaagacaatatcactcgtttccttcgggatcgcgcattcgatcttgggtccacgaatctcgacgtcagcaccaacagcaatattatgcaggtagcgcgagacctctccgaagggatcctttcgaatgaagaagcgcaggcagccctcgttctcgtcgtcgacacttagcgatgtcgctgccgtcgtgggcagcggcgtgtaatcccgtccgatttgtaattgtggttgcttgaacatcacactccagactcccgtctgccatgcttcctcgtagacatcgtagttgctgtcgctgggtatgcgtggccgcagcgtgaaaaggctgctggttgccgacacgggctcgcgggatacaatgctgtatttggtgaatgtttcggggttcaaggtggcggatgatgtattttgggattggatataggcgcctgcacctgctgctgttgcgcctacgaaggcgatgcttagccagcggcgcgagttggaacggggggacttcggtgacgtcggggttgctgaggttgaagcatagcgtacaggccgagctacagctctgagaccctggctgcttctacagcataaagaagataggttgttcatgtggaagtgcaattgaagaaaaaagaaatcgcgggggcccggaaatgagggtcgaggccaagggagagccgggcgatcgacaagaaaatacacccccttggcggtttcttcttcttctttacttcaactcactttggagatttctcctctaccgacttgacattctcgttcttgacattctcttcaggcaatggagacttctcttggctactcctgacgacatacctttccgctaccctctccctctcctcgacgatttataccacacggacacaaagagaacatgtcgaatacatatcaagggaacaggaatggtagcctcgctgcgcctcgagactcactagaactcgcctccctcgcatcctcatctcccggctccgtaggcgggtcctcacgctcctcttcccccgacggtgtctcttcatcccgcaagctctcccttgaggacgaagatcctctcgcagaatcgcatcaagatgccgagctagggcgccgtcacagagctcagagctcgttctccatatcctcagcttttgatttcgggcgcaatctattcccgctgtcgcaaacacagggtggttacgcgcccctaggtactccgtccgcggacagaccaggcttcacagacggatcgctggagcggaataaaaccttgacatacctgaacggtctatcgctcatcgttgggctgattattggatctggtatcttctcgtcaccgagtcaggtcaatgccaacgcggggtcgccgggcgcctcgctcatcgtttgggctgtggctggtctgctggcctggacgggcgctgctagctatgcagagctgggaggagcaattccactgaacggaggctcgcagatctatctgtccaagatctttggagagctgacgggtttccttttcgcatggtgtgccgtgttagtattgaaacctggctctgcggcgattatctctctcatctttggcgaatacgttgtccgtgcgtttgtgggcgctgatgttggcgacgtaaatccttggatcaacaagggtgttgcatttggagggcttgtcgcagtgactctgctcaattgcatctccaccaagttcgctacccgcattggtgatttctttatgttcttcaagttcgttgctctgctaggtgtcacagtcatcgggattatagtcgctgtaactggcttctcggctggaggcaacgcaaatgaagaatggaagacgacaggatggttcgagggaaccaccaccgagatatctgattttgcagtggccctgtatgcaggtctttgggcatttgacggctgggacaatgtaagttgacactcaagtattttgaatgcttccactcacatcttacagaccaactacgtgacgggcgaattcaagaacccaaaccgcgatctgccccgagtcatccacacggcgatgccactggtcatcatctcctatctgctcgccaatgtctcctatttccttgttcttcctcactccaccattgaggcgagcaacaccatcgccgtccaattcggcgcaaaggtattcggcgcccccggagccttgattttagctctcgtcgtctcagccagctgcttcggagctctaaacgcaaccaccttcacaagtggccgactagtctacgcagccggcaaggaagggtatctcccctcaatattcggccggatcggtctccacgcctcctcgcaaggccctccagcaagcagccgactacgccgccgctcctgggccagcagggccctctcccgtttcttcggcgataactccagactcggcttcacgccaatatatgccatggcttttaacggcgtcctaacaactatctacatcgtcgtcggcgagttcggcaccctcgtcactttctatggtgtagccggatacaccttctacttcctcaccgttctcggcctgatcgtcctccgtatccgtgaacccctgttggaacgtccctaccgcacctggatcaccacacccattatattttgctgcgtgagccttttcctcctcagccgagctgtcatctccgagcccttgcaaacgctcatcgtcgtcgcgttcatcatcaccggcgtgcccgtctactactggcgtatttataagcgagatggtcggatcgatcttcccagctggaaattctggaagcgccgataaattcggggaaactctccgcctgctctgatcctgttcgcttgtatgattgtgatacccatgcgtatatagctagggtgtatggtgcgaagtgaaagctgtctctggtgtttgtgcgtgtatttgcgcttccaatggaagcctttttggcgacgatgtgatgaccatggctttaggcgggtgcattctgattgcttcatctttttgctcgttgcatgatgccccacgccgcgtctacttctaccctgttttattagagatctagcgcgctgcatactacatgcggtgcatactgtatataatcttcataatatttgcatattgtaatctctcatacaccaagcccatcccatatagaagctcgcacgagaactgcaggctgatccccgtccaccccagcatcagactctgcgaagaacagtagtccgaagcaattagcttctgggtggtagattcgtgtagatatgaccgttctgtcattgacaaaaacttctaacacacttgagtcgaagaaagcgtgcactcgaagagtttcttcaacctcgtcacctcgctcattcaggcaagtaaatagcgtgtgcggagcagtttcatagccatggtttacttcagtgtcgtcaatcaaaggtcgatggatttcgaaggtctcacttcgtgggtcccaggaaagggtcgtgcaatcttgaccgtctagatgaacgagtatcagttcagtatatataagatgaatccgaagaatcagaaaaatgtcttaccatgagtgtgtagaatcctgatacccacacgtgcacaggatctactaaccgagaattcggcgtcgatttcccatttagatgtccccaacagcatcgcactttgtgaaggtgatgtagacagcgcaacgtcagcgaggtggctctcccgtgcactctgtctgagccgcgcaagtcggctatctgggttgatcttcatggtatggatcgtgaaagtaccggtaccaggtgcatcggggactgcttcaattgaggtaatcgaacttaactccgagattcgtgccttcttgacatttctcgttgtcatcaatcccactacacgaggaagtgaaagcaggccactgaatccttggcgatgacgcagagtattggacaggtcctcttccgtgatccagccatagacgatacgttgcgaggtttgagggtcgtagaaggagttcgccgcatagtagcagccatgatcgaagatacccgagaaagcatatgaggctagagcaccgtctgtggaggtagattgcttttctccgttggatgtgacagatatccagaactggcctcggggttctcgtctccgacgtgcttcttgggccgcgtcttggtttgaactctcgaatggcacacagccctcggctcccattatgatgaagtcccgagacgtggtatcattggtcaaggtcatcagattagcaacttcccagttcagaccatagtcgcctgaccagcgagatggatgtagattgaggccgacgtcgatcaatgggccaatgaactcccacttgctgagatctgttgcttggacagtgtagacaaatactgttggagttttcttggaaatccctcctgacacaaagccatatagtgttgacggtgtgtgtttggaaagaggtccttcggcccaagttgtgataaaaggatctctccagcccgtcacattaagatgtggaggcgggccagtgaggaacgggttgcaggtctggcgctcccaggtcttgcctccgtcttgcgagacagctaaactgagagactcactaccgagtgtatatgggagcgtataacggattgggagatggctcacggaggtgtatatggctgtgagagctcccggctgtccaaaggcatcggttgcctgtagacatcccgtaaagacaccgaggcggtcatatttagtagcgggcgtcaagatgggatcggtggatatcgcccatgacaccaggtctggagatatagcatggccccaggagatattgccccaatcattcccgtgcgggttccattggaagcataaatggtataagcttgtttttgggtcgtatcccaatccatttgggtcattcatccatcctgctggtgccatgacatggaatgatggtctccattgtgaaggattacgaagcgatttctcttcatgagataggccattaacttcatgggttaatccgtgcatttcgccaataatccactcatctagccgggaatatgagttttacgaggttgctcggattcgcacaccttaaaacataggaaatcttgaacgagtccggtcttcaagacgattcgggggttaatcgggaataggttcggtgtaaggaggattgtcggcgaaatgcaatatatagatcaatataaatcaatgcaaatcaaaacaagtctatacaaagcatcagagtatataatgcgatagtcagacgggtttctgatctgaatatatgcaatgaagatgcattccctcgagtcgcaatgggagatctcggagaaacttcccctaataaatccggggagtttaggattttggggaatccggggaactccctttcttcaacatacaacttgagccttatggaagtgtgtcttccaaggattggctcacacaatctgcatgtctttcaagtgtggctcgactgagactcaagtcgactactcgaactcgggcgcgcggaagtcgcacgcggtcaatgtccagttaattttcgcctgtacagtgttcggtgccgcatcattcttgtacggattcgatgacaagattatatccccggttgctgcattgccggattttgtaagtgctcgtttttttcataacacaaaatgttccaagctgattcggagcaggtcgagaaattccaaggacctaacccagtcactgggcagtatgtcctcacggctcgcaatcaaaatctagttttctcccttccattggtggcgtccgtgatcggaggtctgcttgcttcgccactgaatttccaccttggtcgcaaatggcctttgattattgcgtatttcatatctatcggtggcggattgctgcaagtctttgcgccaaatttggggtcctttgtgggaggtcgttctatcaattcggttgctttgggtatcataaatgcaactgcccctttgtatatctccgaggtattgatccctaccgcttgttcaatgttcaatctcgctcattcttacaattaggtggttcccgcctctatacgtggaagatgcgtcagttcaatgaatattttgaatctaaccgctggcgtggtaggtactgtggtggtcttcagaactgaaaagattgaagggaacctatcgtaccagattccaatggctgtacaatgtgctctgcctgtgcttcttctgttcctaacggtgccccttccagaaagcccgcaatggctggtcgggaagggaaatatagaaaacgctcgacgcaacctgcggaaactgcgtgggtccagtgacgacgaggttgaagatgaactccgtctcatgatgctgtctgaagaaaatgagcgcgagatacacgcccagaccaagttctggcatatattccaacgagagcacctcaagcgtaccctcactgcgggctcatttttctctcttaaccaaatatcaggcgtcattctttcaacaacgtatacaaccgtcttcctcacagtactaggggttgcagacgtcttcgccctgacaatcatctcatcctgctgcacattagccggcactatggccgcacccttcgtcatcgaccgtgccggtcgacgtcccacggcattcgtcggaatggggattctgttcgtaatcgacgccgtggctggtggcttagcttttgacaatagcaacaagaaagccactatggccattgccgctttgtccttcgtattcaacttcttctgggcctcttccttcttctcgctgtcaatcctaatgccctccgagatggcaactcccaaactccgccaccacaccatggcctacacgatcgcctgtgcacaaacaaccgccgttatcaccaccctcgttgttccgcagctgacttcggcggatgcagctaaccttggtgcgaagacttatctcgtcttcgctgcctgcatggctgttatcattgtctttttctactttttcatgccggagacgcgtggccggacttttgctgagattgatgagatgtacgcggctaagatccctatgtggaagtggaggtcgtatgagacttcattggagttgagggcccgtgaaaaggatttgtgacagagcctcgattggtttatttttctaattgaagtctgtaaaatatactcgagtaaatactctatgcttttcgcgttgtaccgatcatggatatataaacttgggtatagttgaactcgctatattggtacactgtaaaatctagtgaaacccgatttttccatggcatgagccaaggtataaaaaaagtaaattgtacaaatcgaagacccgttcgtgcaaggaattggaaaatgacgcaggccaagtagcagaaaaaacctccctaagagcctcatcattgcgcccactctggagctttgggttccatgatctgtagcgagcgtaggtgagctctatacttctccaggtaaggatggtttccaccgcggaagctggtcataagtaacaaaaagtcttctgcgagactctgggctgtggaagttgtagttgtcggtattatttcggggaaattgacgggcatgtttaggccaatcccgtaagagggatttgtgttgcataggatgtttgtggcgcagattgcgatatcgtacagcttttcggtctagatgttgagttgttagtaagggataaaggtcagagattacagcaagttacacaccaaaccgataccatgggcttccatggagctcagccgtaatgactggcacagccggagagtggattcagcaacggagacggcatatccgaagcttagctcgggttgttccgaatgggcactcagaaggccgtgggttgaggagaggagccagacacggttctggagccatttctgggtgataaaaacgtccgctgcttgggtctctcgtaggcccatggcaaatgtgacatttctgctttcgcggccttccttggctcgctcgaaccagtcatagccgcgatatcgttcggcttggttgactcgattgagattttggtggatggagagtgccttgactgcggtcagtctctggcagtacccgttgctaccatcacatcggcggttccagcagtcgatgacatcttcgtcgatggcatcgaatagttccatcattcgtgcgagacccatcattccctcggcatccttctcgttgtggaccacaattccagagacgacgctatgcgtggcgctgtggatgaagtcatgcactgaccgcatagtgaatccgggcttcccccagaaggttattggatgtcgccgttgcaaagcataggctctgaagtttatggtcagcgagttgattttgaacagggctagtcactttgattacctttctgtaatagagaggacgaggtacgttcgcagccgctggcctttctcttccccagacaaatcctgatatgactcgggatcattcaatcccagcgtggccgcaagatctagtgcctcccgtatccggagccatgctgcgttgtgctggttacttccaaacaaacagccaaagaggaagaaactcgttagaacagcttcaatagttggattctcgccaaaatctgaacagcttcgcattttggtcgctgcgttcatcatggctcgtgcttgcagagctcgagatgaggacgtcggccgctcgttgatctcaattggctgtgtgagcgagaatgcacataacgacaagagcatggccccgaactgagagttcttgcgatgctcttgtgtgatcattgaggtgtacagggatgaccggttgagcacgggtatggtcggatgtagccgatcaaagtagacatcgatccaagggattatatttgcttcattgattgtggatggccagattgcgtcggtctcctgggtatctgagcgcatagacctcacggttggtgagaatgccatatttggaccttcctggggtatccctatggccgcagccgcagcatcggggacaggttgaataatagacgggagagatggccggagatatacattacttcctggtaaatcgaagatagggacttgcgcatccagattatccggaagccagtactcgacgtcatttcgatcgttccagctcaggccgctgttgtgagaatctatagatggggtttcctcaccccaggctgccatcggaggaggtatacctgcaggtgccaatccggcgccctctaagggcatcgtggctggaccatgagtgggggccccccaaggtgctctaggtaaagcttgaccagactccaccgatgaggatggagcttgaaattggaagccattcttagactcttgagtaggaatgacagtttgctgctgtcgaatttgcgacacgcgactttgtccctgtcagtgagattattcatagtcacgggccattactcactgcccggttggtccgcgcttcttctgtggttgaaggaatgtacaatcgaagcccatagactcacaggccttgcagggctgtgacaagctacactggggtggtcagttagtacattgactgttcatttaatatatagggggcggtggatatcctaccttgatcttgcgaaatttgcattggtcacatgccctcttggcaataggcgatttatgagatcgaatggggccagtggcagagcctggcgatctaatttccataatataaagataaagctgaatacgaagtagctgcagagctataggctcaggtagagagagattgtcggacataaaatctagtgaggtcgaagggtctgacccacattggcccccttcccctctcctgtttcctctcttttcgctcctcgaacgatcttcacgtcaagaagatcatgaaaaaacccgccaaattaactggggaacggcaagtcccgctgagattggactgaagaaaaaaaccaatcaattcatatatggcatttgaccagaatgtgccacgtctccacttgataagagtggccctcggagtgtagtccgagcagactatattaagctagtcttgacctccgtgaaaatggcaaatgatagcaaaaatgggcagttcacagtcgtgggaagagattgtcgctcacaaaaggctcatcagagaccaacttatcgcaccgtacttagttgatgtagctcaacgtctgccgcaagtacagaaccccgaggagcgtactcggctagaagatcccttgattcagaagataacagatattgacaatgttgccgccctactggaatgcctggggaagggggagttccaagccgaacaggtgatcaaggcatatatccaacggtatgtctgctatcatgtctgctatcggcgttggaattgaccatatactaatatcctcggtagggttgtggttgcacatcaattggtatgtgtctttcatcctcgtccctatttccatcgaccaactcactgatgtaatcttgcatgaatagacaaacagcctgaccgagattcttttcgaagatgccttaggacaggcaaagcagctagacgtcgagtttgcagaaaccggaaagctcaagggtcccctgcatggaatcccgatcacgctgaaagaccaattcaatgtcaaaggcgttgacacgaccttgggatatgtgggcaggtgcttcgcccctgcccaggaagacgcagtgctcgtgcagatcttgaagaacatgggcgctatcgtcatcgcgaagacaaaccttccacagagtatcatggttcgtctgagcatcatcactagctgtatccgattcggagattgacttcatttccagtgggccgaaaccgataatcctctctggggactcacaaccaatcctcgcaatccaatctttacacccggcggctcaagtggcggcgaagccgctttgttgacattgcatggatcgctgttcggattcggaactgatatcggcggaagtataagaatgccacaggctatagtgggattgtatggcttcaaaccaagcgtaaataccaaccgccaggaacaaactgcctatccaacgatatgtgctgataaacttccgaacagagtgccagactcccctatgagggtgtacccgtctccactgaaggtcaagaacatgtcccatcttccatcggcccgatggcccggaatctctcgtctatctgctacatgagccgtctgctagcgaatagtcagccctgggacctcgattcgcgatgcgctcctctcccctggaacgagactgcattccaagaaccccaagaccgacctttggtcatcggcttgattctggatgatggcatagtaaaggtccacccgcctattttgcgcgccctacaagaactctcgacggtgcttaaagcaaatggccacgaggttgtggtctgggatacatctgaccatgcggggtgcattgagatcatggatctcttctacacggtcgacgggggtgaggatattcgtcaggatgtagctgtcgccggcgagccgtttattcctcacgttgaagcactggttaaccgaggcaaggctatctcagtctatgattattggcagttgaacaagcggaaagctgcagtgcaaaagaaatatctggataagtggaatgccgtgcggtccccttcaggtcgtgctgttgacgttctgctaagccctactttgtcgcatacgactgtgcctcatcggaaattccgttgggttggttatactaagatttggaatctgctggattatccggctttgacattcccggtggatagggtgagggctgatctggatgtgttgccctcggagccttatgtcccaagaaacagtgtcgacgagtggaattggaatctgttcgatctgaaacaggcggatggatatccggtgaatctgcagatcatcgggaagaaactccaagaagagaaggtattgggggctgctacagttattgagaagctctggaaaagtcatgtcgacaaatccaattgagctatctaggatttataggcagaatataaagttgggtcaactcgcagactgaatagcgtacatcgccgtggattgcactgatatttggaataaatggtagacgcaactcattatgcagcttgatgggatatctgcctccagagtcacttaaatgacaaacgccgtgggaatatgcaacaaggcaagaactcttgagtctcaagccttgggaggctcgaacaaatctggtttcatgttaatcttgcaaagcttcgccacacagccactcaattgaagtagtgactgcacaccatccagaatacgcatatgcgtgaatccaatctcccgaatgaactccaatttggaatgctcagacaatgtggggatggtcttggtgactcgaaacatggtacttatgatgtcgtgagaggagtaacccagggtcctttagatagatcggttagaaaccagcaccccaaaacaaacaaatttacaacataccatagctcgttcagcccctccagtgccacatccaccttgccttcccaacaagccttgatcatggcctgaactttgatcgggtgcgggctgtcgactactcggaaaacattgtctccgctgacgaaaccgaaaccggaccaagtactctgcaggttgttgatggcctgacgcatgtcgccctctgcactgaaaacaagtgcagcgattccatcctcggagtgctggacattctccgcctcgcaaatctgcatcaaccgtttgaccacctgagcatctgtcagtcgggcataacggagaatggcgcaacgggattgaatgggttcgatgatcttgttcgactggttacaggcaaaggcaaatcgtgtggtggaggaatagatttccatagttcgtcgtagggcttgttgagcaccggcggtcatgctgcggggagacgtgagtccagtgaccagaaggaaactctgacgagaacaaacctatcagcttcatcaaggatgaccaatttatggcgtccttgtggcagggtaaccttcttttgggcaaaacctttgatccgatttcgcaccacatcgatacctagaccacagcatcaatatcgaccaagtcatgagagcgattatgccacaactaacctctctcatcacttgcattcagctccagaactgcctccttgtatgcatctcccagcatttgccgcgccagacataatactgaagtggtctttccaatacccggcatgccagagatgataacgtgtggcatattaccatctttggcaatgatctttaaccgttccactgtttcagtgttgccgacaatatcatcgaggaaggttgggcggtatttctcgaccctattgacaagccaaagattagctctacctgatattgtcaagaaaggaaagcctaccagggaagctcatagtccacaggggcaccggcagtatttgccttagcagcattgcgagaagcagaggaagattcagcttgaaccattgtgagtgatttggtgattccaagtaaagaagagcagtgaaggaaagacgcgaaagaaacgcgtgggaaatgcgataacggcttatcagctggcctgtgcactttgcagatgtgatggcattgatgtatggtgcattgaagctgttattttgagattttatattacagaatctgtaaaagactgagtacggagtagtcaatcgttcgtaggttgactgctgcatacgtagtttagttcaatgctatcgttttcgtgacctgccccccccccccccccccccccccctctttttttttttcctccccccccccccccccccaaacttcattctgcgccattcttcctctcttcgccccaacaacaattattcttaatacctagaagtcggccaatgactccattccttctattttatacactctaataggcacagctcagattaacctactcttcaaaccatccattttcctctctgcgacgctcacagccgctgcatactcagaactccggccaaacccaacggagaagcacaaaccgtggtgtatacagtcatgcaaacatctggtatgatgaatcagacctctgtgcgccgtaacctctttcatgggaacctcagccgccgacctgcttctgtaggaccacctaatggcacagttcctcaaacccacggcggcctttccaatcgtccctcgcaccgactgaagcctacatcctcggactcggggccacatactcgaccattcaaaaatgcggaaaataaagatattgtggttcgggacaagaatggcagctacaagcttgagattccaacattgccgcaggttctggttggagaggacggcgaggagctagctgaacttgcaccagagggtggaagattcaattctttggaactcaatgggcgtgacaaagatagtatgcttttctacacgctgttttcctctgaagcatagtctgctaatattgacacagagtttgaggcagctctcgtggagatgatggttcggcaccggaccagacaatcaaacggtgaacccgatggtaagttacagtcagattgagtccgacagtcctatatgtgatcatatactgatacgaaacagagattctgagtatggtgcaggaaagcctacgcaaaaaggtagcatcactggatgaagacaattggatgtttgagccggagaaggacttggtttctaactagagggctgcgcttgctgcatgcatcctgatctcattacactatcagtcggatatgtttcccgtaaaggcctgcttcaaaagacccacgcacatctggtctctcttaatcaagctccatgctcgatggcggtgcctcaaccttcttcacagctctggattgcgatgctcctctgccacctgtcttgttctgacctcctccgaacaacataccgctcatcatgtccatcaatgggtttccttgccggggaatcttgatggcgaagtactgctcgccaatctgagccagagcatcgtcccagataccaacttctcgaatttgtgctgcatagtgtgcagtgagctgtcggaagagatcggcacttccgcgctggatggccaaaagcaacatggtgatgaagtttaccaaaggaagggcagggaacacccgggcgtcggagctggcactgctgacttcctgcacaccgagctgaggattagccgctgaaagccgcgaagtgaaaataagcaaggctttattcgcgctgcggagatttccggtgaggaggtatgggaaaactgcgcgtgacgcatagatcgctgcggtgtgtggctcatcgttggtgtaccattcatattcgagctttgcgagagtctcggctgattcggaggttcctagaatgagatgtttctcggcatcgtatggctcgttatctgaggcattagattagtatgcaccaaacattgcgctccgacatcacttaccttcggcgtatactgaaccaacagcatgatgtaaatcggcatctcctcgttccagtggtccgaactttgcactccatccaattatttcttggatgaacctctttcgtgtaggttcatctgacgggaattcgcgtagcaactcgatcaggcgctctgaagaacaaagatatacaagttagcaatgttaggcctgtaatagctactggggtaacctgaagcaccaagctgcagtaatcaaccccagtagtaaaaagatacttgatagactcactcttccgagcccgaccctctgcatcatcattaccgcctgagatctcccattcggctttgttgtatacttcaagcaccaacatgatggccaagtccccaccactggccgaggcaccctgccgagaaccagctttcaatagctccttcgcgccaccagccaggatctccgctgcagcatcgtagttggactgcttgatataccgggcagcaataacacgtagttgttggtgagcttcgtagtaggcgccatcagcaatcctacagacaacgacataagtcagaaccagatcttttgaagtccaaggtgattatggattctcacttttctcgctggcgggcgatgaccttatcaatccgggatgacatggtcgactagaaggaggcgccgagggattatatcaaagaaaagtagaatcgaggaccctatcaagcagagtgcgcaatgcaagaacgttcgcgaggagttggttgagatttggtggggacacggcagttcgcccagggccctggagaacatgacatctccgtcatctcctcagaaataccttatggttgctttgtagctgaaactgcttttgtttttacgtggaatctgctatttctactatttggactctgttcgttttattgaccccttgtttccggcgatattacgatgataccacgccattacggacatccctaacgactatacagctacctagctagtcgcgacaatccatatcaaggaccaagcaatcgctcttcttgattcagccatgtccatcacccaatagtgcgccaaattcatcatgaaccggtccacattcaatatccagcccctgcaccgcttccacagcgcaaatacctctatccggagaccgagggtaagccaaagacctagtgctatgtcaaacaaatgaaaatgaatcgctcacctgctgctaggaaatcgcttgcttctcttatgatgaaaatcgtcgtttttcgctgggcgattcgtccatggcctactactacacgccggctctccctgcagacctgaatataggctatgagacattccagaagctcaatgatgtcccggatgagcacttagatgctttacttgatacccttgttgctcatgagaaagaaacagagaagaagtgcgatgtagacatcgtcacatggagaggaatgatgaccaaggtgtgttgaattgaagtctatcgcggactatcatctggtttggaaccaaattcttacctctatttgcagattctcaccgctccctttgataatatgaatgggtttgtaaccatgatatattccaaacatagcgtgctgtctctctaaccccaggctatctctagcttcgagatgaatgcaacttgtttccaggtacgatatcagtctcaacaagattttccagattccatgatctaacatctatcaaagggtaccatgtgtgtatacctagctagcaagttcacaatataaggtgttgacttgttctagattcattgaggaaaacaacgaatacaaaaaccaacagaaagagatccaacgcaagcgaggatcgccacctggaatggcaccacaggaactcatgatgtattggggtgtgtcaaacaacccatggaaatgtgtatagactaacaaccctaggctataaattcgaaaagctggctgtacttccgaagacgtgggatgaatcaacccgtgaagagatcgaaggccgccagaacgaagtcgtcaacaatgcagcacagtattgctcggttgtccgcactgggatcggtaacgtgcgtatgattcttggtggagaggttgatgccagtatgtttaccttgattctcgtggctatacctaaatctaacttatgttctagtctgggacagcaagccatcgcgaaaagaaagccccatcaactgggttgagctgaagacatcagctcagatctgcaatgaacgtgatatgatcaagtatgagcggaaattgctcaagttttgggcacagtcattcctgctcggtgtgcctaagattattgtgggattccgtgatgagaatggtatttgccatagcttggaggagctagatacagctagcatacccgggaaagtgttgagcgtcggccggcgttcttgggatggaaacgtctgcatcaattttactggtgcattcttggagtgtgagtgttctttttcgtgaagtcatagcagcactgacacacctcccagggctgaagcagactatcaaccaggaagggacgtggagaattcggaagaaggaaaaatctccggtcatcgaggtctatcaggttgaggagcaaggacatggcgatattatctcacctgctttcaaggcctggcggtcgaccacgaccaatgcgagttcgtgattggaaggtctaatgtatgatagtcagtactaatgtatttcattgcttgagtctcattgcaataaatgaaatattgcacaggcacatccattgaccttacgaggcgagcggctgtccaagggatcccccaagcgactacctgcacctgagctttacacggaagattttccctggctgttgaaatagcagaagacttttgggtatttctatgtccttaaatatctttgactatgcaatgcgatagctcatgacccaggttcggtttcaggggcctgaatcccctgagcttccaattccttctttcggaaatattcatctcgctgtgccctcttcctcgcagacttgagtccccttttatgctgatgactatttaaatgaatatgccactggtcctcggatgccattgtcttctggcagacgtcacaggtgtagcacttcccgatagggtctgcctgcacacgcttttcctgggcttccttcgcgctgaactccgccgttgctaactgagaaagcgatttgggatcgggggtcagcttattttgctgcatcagttgcataatctcttcggacggctcagtgatgcacttgctccagtcgctgacattggaactgtctaggagataaagacgacgtgtctctccgacttctgtgagtgcttgccagagtttattgcggatccatttgacctgcgatgttccgtactgtcgtgtggcgatccgaattaattcaagagagtttcgtttgagatcttcgatttctttctcgcttgcttccccgtcccggatagccttgaagtatggcgccaattccttgaatccaatggacacccagactccccgtgtttggtcaacttcaattccctgcgaggctttctcctgcaagtagttcgacatcttctccgcctcggtcatcaagccctgcttgaccatgtcatcgacgcgcgcatccaggcgtgcgttgaggacctccttctcggcatggacccaaaataccaatgtattctcgaaccgtagcagcccttcctcctggtctatcgcctttctcttttgagagaattgctctttataaatctccgatgctcgccgccctgtctgaaaatagatttctaatgaccgccggattttccgtgcatctctcgggtgccatcgcgcagccataacgggatccacctcgcgcagcttctccaagacaacttcaggcgacgaatccagaatcggccatttattcgaggttgtgctaaactccatgagctgttcccgctcgccttcgtcgtccaccccctcgcccacaagctgttctttgaacagcactgcttgggtataatagtgggtgccaccaacaagaatggggaccttgccacgggcgtggatgtcttcaatgactctcagggcttctcgtttgaacagtcctatgcgccatgcttccgcgtctaagtcgatacaactgaggaggtgatgagggataccgttccgttcctctatcgggatctggttcgttatgatcggcaaaccgcggtacatctgcattgcgtcgccattgatgatttcaccattgaatcgagaggccaagtccactgcaagctgtctacagctatcagtcattgtgttcggaggaagttttggaggtacctggagtcattacctttgacttgcctgtgcctgtggcgcccacgacagctatcagcggattcatgattgtttgaccgtgccaaatagatctgagagccgacagcataccgcgatgctccttgcaacgacgtgggggaaaaagttgttatcggttatcaagcgggttacctcagccatggcgtccccaacccctcagggtcgtctcatcttacaatgagctaacatcaaagcagtctagataagtctggattgataaccttgtctgcttcatttttatctccttcttctcaaacttgtcgagtttgcttttttctcagtgcttttttttctcacacattcgtcatggcggataccaattccactcccccatccattgaggtacaaaacctctcgtacaagttccaagatggctccagtggcctggagaacgtaagcatgagcttaccagctggaagccgcaccctattgatcggcggtaagtcaaatccatttccatttcagactaatcttgacgactaaccaaaacacagcaaatggagcggggaaaaccaccctcctccgcctcctatcagggaagcgccttgcacccaataacaccatcgccattggtggtaaggaccccttcaaggacagcctagacggcgtaacctatctgggagtcgagtgggtgttgaacagcatcgtccgcacggacatcgatgtgccgacgcttctcgcctctgtcggtggaaatgcttatccagagcgccgggacgagctgatcgatatcctcgatgtcgatctgcgctggcgtatgcatgccgtctcggatggagaacgccgccgcgtgcagctggccatgggcttgctgcggccgtggcaggttctactgctcgacgagatcactgtcgacttggaccttttgtccaggagcaatttcttagctttcctaaagcgagagactgagacccgcgcctgcactattgtttatgctacccatatcttggataacctcgcccagtggcctacccatttggcccacatgcacttgggcaaggtcaaggcgctgggtagtgttgagtcgttccatgaggaagttcccgcgtggacttcggagaatagtcgtcttggagagctggttcttaagtggctcaaggaggatatgcaggccagaggtccccggaatgatcgcggtaatcaggccaagacctaccagtcccttgagggtattggaggttacggactggaaaaacacgactgaggagaaagatattgatcttttcttatttttcccgttttctttcctgtttttttctttttttttttgcatgctagcactgatgtcgggagtcatgtaacgtgccattcaacaacaattcggttcaaccacaaggcatacacggggttataggttggcatctgcatctacagggtctattcaacatttgggagttttcaacatcacaactcaggctagagatatgtttctttctatacaaatcatgagagtatgtccgagaatatatacgtgtggacatagtcctcacttggtagttctaactgatccctgatctatgatatcgagtcatgagatataaaataggtacaagcatacctataatctaaatatgaagttggtctaacaagataccatagacgttctgtactttgattccactttgttttcgtagatgtcttcgcaaatgccttccaaaatgtttgaatagacctcgtaaagccatagattgtgtgtttgcctgccacatcagaatgtgaaggcggtcatgatctctttatatctttctctccttcctctatctgtctcttctatttctattctctctctctctctctccctcgcacacacaccccccaagaccagaacaaccccggaccctctcaaggccggcttctttgcattttgtcttctcttatttcagggaagtcacaatgcctgacaagggcaaaaaaagagtagcagtaagtgaaaccaagtcgcaaggtttttgtcacgttgaaccttgttgaagcgtctgtttatcccctaccaaaggaggtaatgtcgacatagactgactaattgaaaaatagcaatggtgcacattttgtgagatagaaggccacacccaggaggagtgccatcgctgggctgcctgtctgagagacacggccatggccaataacatctccatgatggcagcatacaagccctcccaggtaaagccaccctataggacattctaggagtcatcttattaatgagtctttggtagaatcagaagaccaacccccacaagaagactcatcgtagctaccgtggtggtcaaaatcgcacaggtatgtaatcttcatacacccaaccctatcttgggcttgattccttggaatatgtggtttgccttgcaatcgcccttgaaacaagcgaaatcagtcatttgacaccacttgattagtggatggcatcaagaaccatcgagacatgtcctaacaatgcgtacttagcccgcaacaacctccctcctcgcccttcttccttcgcccagtctggtatgtgaaccttctcaatttataaaatccggttcctttctatatacctccgagcatcgtttttctggtttgagctgtaggctcgtcctgcggttgtattctatgggttcggcttataggtttagcctaagtattcggcctgtacctgctactgagatgatctgtcagttcaacgttacgatgtttgaattgtgcatttatagctcaaccccacccccaacatctatagggcttactctaaatattgttcaaaggacatatgctaacttgtaggtgattctagtgggcaccattaccgctactcggggtagctctagcgtggagcctgacctgctttcgatattagtgcaggtctctcggtccgaatcagagcttctccttcggttcctagagaaaattaggggagatggaagcgccgacttcgtagagaatctcttgattggggacgaaccaaaacaggaggaaaccacccagggcccctgtaaagaatctggtagtgatgaggtcaagaaggaggcttagtttctcaacggcatacgatgttcttttttcaccttggagtaatttaatgaccctgcatgatgttccttcacttcccacgtacaacaacatatatttcgatagttttgtacgaattgtacattggtttgcgtctgatattaaatagacatttacagacatctcaaaggatctcaaaggattaccgaagggacatctatctacaaagacattaaaaggatatctcaaccatcatgactcataaagggcggctgcctaggtaaaactatcttggttctcgtataaatcatgagagcatgttcgagatagcatatatccgtgtggacgtgtcttcacttgccaccgccaattcgaatcgatctctgctatcctctgcagccggcactggtcgccatgataattgagtaatcgtctttgagggcgagacctctttgtcaatggtcacgacgtgctgtgcttcgagggtatcagcagcactccggtggatggagatgacaccattatcctcgccgacagcaataacgtatgtgcctttgtatattatgggcaagaaagcaatttctgagacggccgatgtcagggccacggtcgttttgcaaacgaaagtgtcttcagacttttgccagatcttcacagatttgtcacgtcctgccgtagcaaagacatagtctgttgtagctggggcccaggccgcacctaggatcattcgagagtgacccttagggttcaagctgaagtttgtaaaggtagttgggtctgtatcgctccgctggaagaccgcccattggcgatctcgtccaacactgagaagataacgatcgtcactcgagaatgagaggtccgtgatggttaacgagtgcgcagtgagagaaggcttgatctcatgccagtctgacgtatcgtagaggcgaattaccgcatggtcaatcgagctggccttgcaggcagtagcaatgagcctacggtcatggcttactgccactgctgatatctcataaccatggccatagagcttttcatgctccggccacaaggtgtaacgagacaactggtcctccagcggcgggtggttggcagctagcaaggcagaggcgactggcgcctcagttggggctttttccccgtcctcttccactggtgcctcatctccaagtgccttgttcgaaagacccagcactggaatctcagcagtgtctgggaggtcctgatcattcgattgtttgaacccagtgagtctctcgagcaactgagcaatttgtttgggctcgttgaacacacgcaagagcttctcctctgcaccagtcacgaactgtgagggacccagagtatcgacacagttcaaatcgtacccatgaatctgagggcgggaaaattcatgccatgaacctgtatttccccgtacccactttgcatgaagccgcgtggtttggtctgaactcgttgaaagcaggtagcctccagtgggctcccattgtaaaccgtttgcggagcgcacatgacccgaaataccaaacctctgtacccaaatatccgagtcggactcaagtcgccaaactctccaacttcctgtccggccaagacttaccacctgcctcccatctggtgaccagagcccaatccagaagccacctgcactaccagtcgccgtggtagatcctttttggacactgatctctcccattctctctgtggacatccagacgcctgatgcttggtcttgttcccaaattgtgatggtattatcagccgatgccgaaagaagttgctgccgcttcgaatcaggattccacgcaatagtataaatccaatcttcatgcccaaagagaagagcctcgaaagtaattgagtatttcgatcctgcagcctcaaactcatgggctttgttcgatagcgtaggctccattcctccaagcagaggatctgtatcgtctattggagcaggtacacttgcttcaccccgacgaagtcgccagagacggatgtatctgtcttgacttgcagacgctagcaggatatcgccgttgctctgcttgtcctgagtgaacgcaagagccttaatccaggcttcatgtcccccaagtacggcccgatgcttgaattctggcttgccgatggaggtttccgagacgtaaatatgaaccttggtcgttgtacctgcaacggccaacaccaatggcttgtccgagtcgccttcaagtccctgcaatgatagagatagtgggaagaaccttggtaccattgtgatcatttcaagtagctcgcatttcaacccatcctgtgcatttattctccaggtccggaccgtcccatcagccgctccagatgcgatgatatccgttccatcggcgacagcaatcgcattcacggagcccgtgtgaccctcaagggtagatgcaagtacatagttgtggggatcggcatcgtcttttttccatacccgtattgtgcggtcgacggagccggtgacgataaatctcgttcctgaggcggggcatgtataaaatcgaacgacgctgactttgtcggtatggcccacaagcagagcatggatgccacgatcattcttgtccttggttaagtgtcagcttgtcgttatcaatgcgcaattgttctcaatagacctactagaggatcccataaggcgacattgttgtccgcaccgaaggcgagcaagcctgtctgcgcatcccaatccgcggcaccagggtgccggtttccccccacgctgatatattctgtgtcgacggcgaccatagagtactatgagggcttatgaaccctttgtctgtctgtgctgctgtactgggggaatcaattggaggaaagccgcaaagaaattgcgggaaaattggggcttatcgataagaggtgtctccgcctagcccctccatcttctcaacagactcgacttgtgatctctttacattcttctcaataagcagagataactcctatatgctctatattcaccttcgtctacaacgccatggctgatacttcaaatgcggaccagggagagttccccatctctatcaccgtcgagtttacgtacgtcaaatctttccttcaattgatcaagctctgctgataattgattcttcgatagcggcggcttagaattgctattcggaaatgagcgtaagcataaggttgttctgcctgctcgtttagaggacggcagccggccaaacatctcatacctgcttaaatacctggtcaacaacctcatgaaggatcaaaggatagacatgttcatcatggaggacaatgtgtatgtcaacataacttcgggggttgaacagtattaatggttcgacagacgaccaggaattctcgtcctcatcaacgatgccgattgggaactcgaaggcgaagagacatatgaacttcaacaaggagataacattgtttttgtctcaactttacatggcggttaaacatgattgattgtattgatattatcaacgcaattaagacaaaaaaaaacttgattcgaagtgggctggaagaatgtgagggcaacataaagcgtggacttttacctagaccacatcttcaacatgctgttgtgagatccgttcgcgctcacgcggtgttcggattccactgggtgttcgatgaccactctgtggggttacttgaccatctgggctaccaagcccttgcgccggtgataccaccccacttgggggcactgggatcttcaaatcctctggagaggccgggataatctcttcggggaggtcggggatatggattcgctgtgcctcgttctgatagctctcgggaaggatctgcaatagtgtcaattaaccatagatattaatccaacccaaagtccaatttacctcaatgatctcatcgcgagggaattcaaggaacggaatgtctgcagcattgcaggccatgagatagccatacaaaaccctcaagacactctcgtgtgcaatgatgagcagatcggtttgctccctctccaattcaagaataattggctcgaggcgaacagccaagtcatgataggactagtgcaaatggtcagcagttacacactttgagggggggttggtcaaggcctacctctgcccgtggataacggtggtggtagggatcaagctcgtgcttagcaacctcgtcaccaaactctgctcggatacgatcctcagacatcttctcacaaacaccagggttcagttggctcaattgggacctctgtcggactttatatccgttttcatggaagtactttgcggtttccactgttctgcggcgtgtggaagtccaaaccttcaagggccttgactcatagccagtctctcctcgttcaatcattgcttgcttttcttcttcccggtgagctagaagacgtgccgtcattttcttggcgtagtcttccccctgatccgatagcgaagtatcggctttgtatgaacctgcgtctagcgaaacgccagcctaggtaaaatgtcaggatttttgcatcgtacaatatggactgtaggtgacctacccgagcgaagtacgtgcgtctcgatttgatatggagatttagaagatagaagacgatacggttagagagataaccgaagcttcgattgttgacaatcaatctctcgccggcattgatcatctgtatttgggtgagtaatgggaataggaaagaatcaattgcgcgtaccttgataaagttcaagtccttttcctccatggtctggaattgggggatccgagaatagatacggttcaagtaatgcttcacggcatcttctgatttccacgagacgtactagcatagtttgtcagtttccattcaatgccaatatatacatgagactcacatcaggggaggagatcttgactctgcgaacattctcttcaatgatgcgttcgtcgtcacaccacgactcaatgaacagggtctggtaaaagataattagtctattgtcaaagattcaaatgatcaactctgacttgcctcgatatcatgcttcgcaaactccttggcaagcgagcgccgtcctgagactagcgggttgacggcatcatatatcgctatttgaccattttcatgattcaaaaagtgatagatgtcttctcggcattttctcacaatcttttggcgtagaaggacggacttggcagtcgctaaacggaaatgtcaatatggtcattcaggtagctcaggataccatgcctaccattgacatagaaataatcatctggcatgtcctcgccaaatggaattgtggcacgacggtagtcgcctagatggaagattctggttttgacaccaagcctatcaatgcatcagcatacctgtaaatgcgcaaatcacaggagtaaggcataccatcgcaggtatcgtgccaaagctactgagatatgtctgtcatagagttgtaattagttcaccgcgcaacactaatctcaatgttaagaagtttcatacgttttgcctctggcaggcaagccgacggtaatgatcacaatgcggcccgaatggaaaagccgaccagattcggtgctgtacagctgggccggagccaaatccgccttttccggcaagtcatgaattgcatcgacaaagattgaggacttgcgacggaatcgtggggagttggccacaatctcagcggtgctatatgatgtcagttcaaatccacatcaggctacactcttcggccagggtatggctcgtgctttctcttcttcttttctcctttttcctgacattattgtcaagcaaaaagcacacacaagacaacatttcaactctcatggagaagacatgagattgggaagagggaaaggcaggcttacagtaaagtgtccatggtgggatgtcgaggtggcgcaaccttgagatgttgagatatcacaagattcagtatccagcgtgtcaggggtatcgatcgatagctctgagagagaccagatattcctagtcacgtcagccgatggcaagacagtgaagggagcgagaaacaaggaacaaggaaggtacctgagaggcggtataggtaatcgattaaggctcagataactatcaggtgcagctcatgggcttttatttgcctcgtttttcaggctgcaatatgcaaagtgatgcaagcacaattccacaccaaatagaatggaaaagaaagaagcacactgcaaagatcaattgatatcaggtcaaatccccccaatccttcccaatccctccggtcttgcctgaaccgggagagcccgaagcagcttatgtaatatcccggtgaacggcagcaaccaaagacgccgaggcaggtgactagcatttttcacagcttagaagtcttgaattgcttctcctacactcccgagcgcatcagatccagccctttttactctattttatcaaggtcatctgagacgtttgttcgtcccagatcctcgggctggtctcaatcccttttattctctattcttttgtgttttcccccgagtctcaattgagaccgagtaacacgcgtgacgacacctaattattcgtcaattatcagatttcaaccaaaatggccgattacctatcatctctctcctttctcacagagaaccctgccgctgcggctattaacgatgcatactcctcgttctccgaccgaagggccttgctcaacctacccaaccccggcactgtcgataacctggccagggaagtgcagaaggatgttctattgaccaacttcatgttctccggtctccgggcagacctgaccaaggtcttcggcatgtcccctcttttccgtgtgtcgcatgccttctctatgggctcaaccggcaatctgcctccatatgctttctccgccatgtacggaagccccagggtaaggacaactattccatgcgatgccgatcaccacaaatatcagtatttaacatatcgtcccccgataggtgtttatgcagggtaactacggaagtgacggtgccctcgccgccgtcgccaactaccgctggaaccaggcccttgtcaccaagaccaatgctcagatcatgaacggcggtagccagggcttggtccagatagataacgactacactggccgtgacttctccgcgtccctcaaggccttcaacccctctctcctcgagggtggtctcaccggtatcttcgtcggcagctacttgcagtccatcacccccagcctcgctcttggtttcgaggctatctggcaacgccaggccatcaccgctcgccccgagacagctctgtcctactccgccaagtataagggtgaggactggattggtaccgctcagctccaggcccagggcactttcaacgccacttactggcgcaagctgtccgagcgtgttgaggctggtattgacatgaacctccaactccaaccctctcccgctactcttatgatgggtggtccttctcgtgacggtaccactgccattggtgccaagtacgacttccgtgcgtcttcgttccgcgcccaggttgacagcaccggcaaggtcagctgtctccttgagaagcgtattgctatgcccatctctctctccttcgctggtgagatcgaccaggccaaggtaagcgacatatcttttttaaattcctattgatgtcaatgctaattatcttcttttctttctagcaaacggccaagctcggtcttgctgtctcccttgagcttgctggtgaggatgtcatggagcagcaggacaaggttgaccctgctaccatgatccctcctcccttctaaatctctcctctcgcatcgcccgagataataaccctttcaccccccatgttttagtagttcttcactctcatgtctgaaatgacatatgtttgtctctcttcctcggtatatcctcttgaatttgggttgctggtgcaggtggccagttgtttggcgccctggagattccaacgttttttttgtatagattcacactccggttctttgatttccttttccattaccacctgatgctgcatctctgtttggcctgtggtctgatatcttgtgtctccttgctatctttccagttcatttccttgcatggccatgttttgggtctatgggattgccaggcctgggatgcatggctgcgcctgcagatagctctggttatgtttttcgcatcatagaggggccaatgtaaaacaagttttgatttagttgagtttggttaagttgagtcaattgtaatgatttcattgtgaagtgtttcttgctaaggatgtccatggtgcggtcaactctttgtccatgtggatcaatgtatactccgtagtgaactatgcgttggcattgccaaaaatcagaccattcaacatctatattgatctttctttgaaggaattttcaattatttctcataactaaagacaaagctgtacttcgtactttatccgcagatatcaaacaagacacaaagcggagaggaaaatagtcccggataatgcccgcatacacccaaagcggtgaccgggacgaacgatggcattttccaagacaaatcagacgaatccatccaacatcgctccactatatgcagtgggcactggagcacctcctgcaattggtagacgactccggagtgcagcagtggccttatgcatctcctagaatgggaaccgtctctgctttcttctccacttcattatgggactaagtttctcgataaagtgggttcgtttatatgttgggtctcccatgtttcgctctcgaaaatgatacggagggttattgtggggtgtttgtcctggaatagaaaatgaggtacggtgcagacgagatttaggcacggtgtgctatggcactttcgctcccatatgacatgtgggatcttcagccacttactccatattccagcccgatggcagtcgtagatgggccatacgcacccagttccctgcttggagtgtggctgggttggagtgctgcctcgctattggaagtcccgcggttgatagtcgttcagacgctaattatctgactccagtgacatcatattccccgttccaccctctttttagggctttgtcctttttttgaacttggcggttgccctatgtagaagggactggccagtcatcttcgaggccggatatgcacctaaggatgtatgttccggataaatggctgaccccgggaataatcttctaggcgaatcagaattgaaagcagaatgaaatgaaaaaaattgaaaaggaagagaaaggaaattacagtttagagggggtccgagtgtgtcggcccaattgacaggcttagttttggtaatacacaacataggacatgctgttctcaataatatgatttctggaaatgaatgtgggtagcgtgtccacaagacacattcattcccctgaggttcattggtaggttgggcgatttagaattgtatttcgttctaccggtacggagtaccatggaggtcttgcccagggttgtataccttggcatgtaaacgatacttgttcctcggccggagaatcatgtaatcatacagtaactaactatgatatctactaaggttcttctatgttggaatatgaatatgaatagacgcaatgtgtgcttttcaacagatcggtagatttagatcgtcatgaacccgtagcgtggaagactggatccaatttggagattgaaccaatagcctctaggatgattcgcataattgcttgaatcttgggtacgatgtacaccgtaagtatcactttcaacctggaagacgccaagtgctattcgtacatcttatatctcattatacttagcctgcgatatcacccacgtgtctgatagagacctcgaatggaatgccgttccttgcttccatgctttcatgatctgtacatgccgacggtgcactattgggctggcattccgacggtttcctcccatgcatatgcattgacattttaaacatcatgccagtgccgggaggtgttgcttttgccaggaacacacccgattctcatcccgggtccgtgaaacaatagtgctactggtatgcacattgtgcaattttatacattggatacattgtcggggatgtatacggtggatatggacgtccaagggtctatgatgtgtgggttcccaggctgggtcagtattggatattgaatggaatccactatccttaaaaggtaagcagttcgatccattgctgattgatattgagtagcgtcagcaaatggctgggcatcttgttagccgagacccgatggacatatcggaatcccgagtgtacacctgcagtcgtggtaccgatgcatggttctggatatttcaggttgacggcgtcagacccctgctgatggggcgtcaaattctgttttgcctcgtgtcaagcagattaactaatgtcgcatgacaagttgaactgtggcgattcggatccgtcagccatggtcacctgctctcggtctggtgacgtcgatgaggggaagctatagtttaaatttacggagtagatggcgagaatgtagatatttctttggaatgctaagatatgacaaatgatcttgctgggcgaatttgctgagcatctatagagttaggggaagagaatactataactattgtatatggtagttgatcataaataataaatgcgttgccaatcaaatccaaatgtcacgctcaaataccagtaaataccaatacaatacaatacaatacaccaggtaagctcctcaacgttaaccgtttaagcctggtgcatccctacggagttcagtcctctttagtacctgagctggtgccaggaaccaacattcctccccccttcatcagaaggtttctttttcccacttaatacctgaattcataatttattgtctttctgatacatctcattctgcctgccggtccagatctttggtacaagagactgcatggacgggactacggctggaatcccaacgatggcgtcggctgagatagcttcgactcacatgccaaggaacccctgcaccaatgcacttgatagcatcgagatccctcgaaagaatggaagtgcaacgggagcccctttcaattccgatggattatccgggccgaagagctgtgactattgtatatggctttccaaccgctcggtctggatcccaattaccggtgtgttaattattattatttttctcggaatgtccctgttatgcagcgacacagatagaaagccaaaaatgatttagctagtctgtcgttagtagtatactagtcgatattattagttatagaagctggaataactagtgcctccagctcccattgtcgctggggccgtctctcggcccaagctccttttttttcgaggtcagctggtctcgtgatagcaaagaccgcttacagtacagtaatggccaataacggtggttccagggaaaatcaccgttgggtcacccgacatcctgtttcttttgtatgggatgttaggggtgttaggctataaacagattgagtctgtccatgatactatgtatagctcgttatattcccactaccccggagactccgctttctccaaagtcttttctttggttttacggtatggtaattacgccatcacgtatgatatcatctcccgacgtggaaatacggtcagtgacaatactatactgtaaggaataatcgagaattgcatcttgattcgagataatagtgactggtaaatagtggtagttcaatagtgattaactacatgtatatgtatgctatgtatgtaacttataaaacacaaaaaaaaaaaaaccaactcccattacctgagaaagttggatttcaacttgaccttgtagctctcccgcccctctctttttcctcttttcccctcccgaattgctcaaaccccaagacaattggctttgatcgtgaatcctccctcctgaatttgtttctttcacacaactcaagaatcagatccaaaaaaaaaaaaaacacgtgaaaaaggaccagaaagaaaggaactccattccatcaacgtcacctttcttttggccctgaacccgccccaattttacctaaccttccctagtctaacccgtcttatttcactcgattcgacttcattggttgaacattctctacgcaaagttgcccaccttctcctctctcattcttcttcctcttccctacttttactacattcttggctcccgggtgtgccattttgcttcctttcccatcggtccttccgcccctccctactccaccccggtttaccacccaaaacggtcttctccccttcacatctctatctatcgccgcgatgtcacaaaatcgacccggattgttcccgactttgcgcatgggtggtaagatatatcaatcgcctttttaatcgggagacaactgaccgcgtccagaggtcatccgggagaaggtccaggatggactgactggcgaatccaaggagatctcctacacccagtgcaagatcgtgggcaatggctccttcggtgtcgtgtttcagaccaagatggctccgagcggggaagatgctgccatcaagagagtcctccaggataagcggttcaaggtaaatcaaatcggcttctctcactctggagacctctctctgtgtgtgtgtgtgttggactaaccccagtctctcgcagaaccgtgagctgcagatcatgcggatcgtgcgccatcctaacatcgtcgaactcaaagccttttactactccaatggcgacagggtatgtgtctcctgggtgtcccgcccgatcgtcttcccgtcccccgttccccgttccccgtgggctgaccgtgcccccgatctccccctcaaatagaaagatgaagtctaccttaacctcgtcctcgagtatgtgcccgagaccgtgtaccgcgcatcgcgttacttcaacaaactcaagactaccatgcccatgctagaggtcaagctttacatctaccaactgttccggtcgctggcctacatccactcacagggtatctgccaccgggatatcaagcctcagaacctccttttagatcccgccacgggtattctgaagctctgcgatttcggatccgctaagattctgatcgaaaacgagcccaacgtgtcatacatctgctctcgctactaccgggcgcccgaattaatctttggcgcgaccaactacacaacaaagattggtgaatatcccttttgtctgcccaaaaccatattgagttctaaccattactgtcctagatgtttggtccactggttgtgtgatggcggaattgatgcttggacagcccctcttccccggtgaatcgggcattgaccagctggtggaaatcatcaaggttttgggcaccccaactcgagaacaaatccgcaccatgaaccccaactatatggagcacaagttccctcaaatcaagccccatcccttcaacaaggtattttatgacccccgtacccccggtccgtaatggtgctgaccgtactaggttttccgtaaggcgccacccgaggctattgacctcatctccgcccttctggaatacaccccgacacaacggttgtccgcggtggaagccatgtgccaccccttcttcgatgagctccgcgaccccaacactcggctaccggactcgcgccaccacaacaacccccctaaggatctccccgcccttttcgatttctcacaacatggtacaatctcccgccctctctagacacaacccccactaatccaccatctagaactttcgattgcccctgaactcaacgcccagatgattccccctcacgctcgcccagccctcgaagctcgcggcctcggcctcgataccttcaaaccccttaccaaggaggagatgcttgcacaccttgattgagttgaccagagagtgtcctccgccctccgcgagggatacgtatgttcgttgtgccgccatctgcactttgcgtgagattcgacctgccaaccaagttccatgatctcgggtaagctctgaattgagattgcactgccttgtcttttttttctttttcgtcggggactcggtatgcctccgccccggacatggtggatccttggaactggaatgagcagggaatggtatgagatgggaaaagtgcatcctttaatggctgggaagcggaaaccatgtttcttcggggtggtaaaggttgatggttttcacgcaatgggaggtcatggcctggagtttattttgaggtgtctgagacagctctcgggaggaaaaagtgataccctttctgtgcacgtctgcctttgggggtcggacactgcatagtttcatcggtcgaggggaagaacctccagacgcagcaagtcgatctcgcctccggaggggtgaatcttcccacaaatgcatcggagatcttgaagatttctttggatacacgcacgtttagggaggacccttctatggtcaatctctcgtcttgcagcgctagaatccccgttcgttcttccctttgcgtccttgctttcttttttttttgttcgcaatatccttgtatcagattcatcgggctcggctggttccccggtcctccgacttaccggccatgagctatatgtcattccagttctcaagcagacaattttctttttctttggggtaatgcgtaaagaatcaataggatttgaacggtgtaattttctagtatgtgaggaatattcaattatcctacattgtctaatacctatgtagtgacctagtagtgtcgttcgttacatgtctggtccgttgagatacttcccgcaggggcaccgggtccggaacttcaatttccccttccgagctccccattcacctcaagctagctgtcaccctcgttttctacttccccagaatcactgtctctacgatagcaatctggtattacactggctcattggattgattccagaacataatggccgaaaacgaccgacgaaaccagggctacaggggtgggcgcaaacgtcgctacagaggtgagaacatgaatctaagcttcccaaacaacacgctaacttggctgtaattcttacagatgatgatgactttgatcgccgcccccaaagacgcagatatgaagagccattgttcgtccaggtgcgacggcagttgttgaccatcgcggaatcggtacgcgcctcgtttttttttttttttccgccgcgcgcattgcgctctacaaatggtggatatgaactaacgcttatgtctcattaataggctgctcgcagagcagaagatgacgtccagggtattgcgaagacagtcacggataactacgacgacgaggagatccgccgcgactttgtcaacatctcccttgatctgtacgtgtcggtgtactcaaccacttcggagtattactaacttggatatctgcagcgttctcgaacaacccatgaaaattccttttatcgccggcacggtcctggtcgcacatggtctcaagcctgagcttggatccgaggttttgagcaaggcagctgaggccttgcagaagtatatcgacattggcgcatggcgtgaagtcaagcttcttattcgctttctgggtattctccagccagtctatgagggtgatggcatcttccctcttctggaagagctgttcgctcgtgcagtcgatcttcagactgcctcttcggaagatgtaagttgggattaatcgacctgtgatgtgaacctcatctaacagcttctagcttcttggccttgaattggtaaagatcattcagttcaccattccttatgtcatgctgtcccccgccactggcttcgaagcccaggcttccgcacttctggagaagaccgacattattgcgtctacgccgcacgccctcgtcgatctggtgaacacattcagccccgaggagaatcaggaggcagctggtcaaagtgttatcagtttgatgcagactcaacttcaaggggaggccaaccggggctgggagcttaagtgcctccctcgtccttggaacgatgtccctgacgccgagacggatgagcccaagtctttcgagtcggtgaccaaggttcctttccccacgatcaccgtgcctaatcctgtaccgaacggcgcgcgccctctcttcccagaggtctacctttcggtgtatgccaaccaagaagtagacaccgtccctgcgatcacagacatctcctcttcgcttattcgggatgcactggtagacaccattaacctccttgacttcaaccgcgttgctacggccaagttcctgatcgatatcgactgctattttacctctaccacattcgtgaagcgcgccacgcctttcgaccgaatgcgcgagctcatcggagaggtgcagccgtggaagcccgaggatgtggcagtggacgcagtcttctcgcagctattccaattgccagcgtcggaacacaaactggtctactatcactctgttctcaccgagtgctgcaagatcgcccctgcagcaattgcgccgagtttgggtcgtgcaatccgattcttgtataacagcctggaaacaatggatttggagcttagcaaccgtttcctggactggtttgcgcaccacttgagcaactttgggtttacatggaaatggagcgagtggtaagtcgacaatgtcagcttctacacggtgtaatcggtcattaacaatttcacagggccgacgatcttgatctgccctccattgatccaagaatggcgttcatccatggtgctttggacaaggaaattcggttgagcttcgctcagcgcattaagggaactcttcctgatccctaccccaagttgatcacagcaggcaaagagaaggataccccggaattcaaatattcctccgaaagtaaatttaattcgtggcccaaatggcagagaatgtggctaacctgaacttccagtggcaccatattccaaagaaggacaagaactcatgcagcttattcggaagaaggctagcgacgaagaaatccagcccgtcatcaccgccattgaagaccaggccaaaagccagggcgttgacgaccccaagatcccctcgacagatgcattcgtaacatcactctgcttcgtcgggtcgaaatcgctctctcacgttttgtcatgcatcgaacggagcaaagaccgtcttctggccatcggcacggaatcgccacacgcccgctgccaaataatcacctccgtcatggagtactgggtcgatcagcctggtattgctatcaacatcatcgacaagctgcttaactacaccatcctcagcccgctctccgtcctcgaatgggctctctccgagtctgtcgcggcaggaaccatcctcgcaaagccccacatcttcgagatgatctccgccaccgtaggcaaggtcactaaccgcatgcgccagatcgtcgccgcccgcgtccagcccggcctctacgagccccagcttagcgtcatcgacgagaccctcgcgagcgagcgcacagacatgcaagccctcttcaagtacatcgaggactctatcgtctccatcgccgcgggaagcaacgatgagctgatggagcgcggtgatggcagcggcactctccccgaggacgccatcatccgccaatggggtcgtcgctggctccgcgtgttccggagaaaagctgccgtcgaggaatccttcatctctgatgccctggctaacgccactcccctcggcacccaggccccgcctgtttctgtgcgggagggtgctgcggatggagatttggatattgccgatgccgatgcgcaatagagctgtcacaaatatggatgccatctcgatgaggtattagcttatgcatgctgcgttctcgcatttgatctctttgagctttttcattaaatgacttatgtcccggagagcctttttctgcctttttctccattgctcctctgtattgtacactccaactccgggtctttgaatggctgacagaaatatgaaaatctctctccgattattccaaattaacctttctcgattcttctcgagacacaacgaatatgcgggttgccgacctacaccactgaagttgtacaaaactagaaaaaaaaaaagaaacaccccaagaccatgttgattcaaccgtacaaccctaacgcggggatatcccaaattcaaaatacatatgaaagtcttcgtaaatcgtgtacatcttgataaacccaaaggaaaataatgagaaaaagagtgaaatccaactaggacttggatccagaagacaatgagatagaacaataacaaaaagggaattaattgtggaagccacatggaaaccagtaagaaataagaacagggatatcagaaaggggtcatcagtagataaatacaaagcaatataaaagaagaatgaaaagaaatgtccgaaaccaaacccaatcaatgcccatgaccatggctatgaccatgaacatgaacatgaggcttgcgctcaatataataggaatccccatcatcgccatcactgctagaagtattataaacggagaagccatcctcaaagctcccacggcgcatctgcatctgcaactgcatcttcgaaacgccctcctcagacccaacagactgtattcggtccatgaggactcgatccacgggggcacatctactctttgggtcagaccgtctcgtcattgagattcgccggtccttgccacggcccttgatgcccttgttgctgtttttgtatagcccggcgaaatatatccagagatcgcgatctgccgcattcatgttcatcggtccattctcggccatttgtgagaaccggatcgttagattgtggagtgttgctgcgtggaatttgttttggtgtgactgttttgggataaggggttagttagcatgggttggcttaaacggtggtgttgtatggaagtattgatggagggttatcataaggaggacaaaaacttaccttgaggttgcctaactgggtgaactgcttgccacattcatctaaacggcagtcaaaccgtttagattgatcatgggtgagcctgtgagcgcggaggttgcctcgctgagcgaatggcttgtggcagatgtcacattgaaagggtttttcgccggtgtgtcgccgctgatgggtctaggttttagcacacatgtcagtgtctgcctcgtgcatcgcaatcgcctggcgcggcagctggtgatgtgcttaccttgaggttgccttgctgcgagaagcgctgcccgcatgagggttccttgcatatctgccccattcaaactggttagttgctgtcttaaaacatttgattcaatttggatagacatatgacaagtgtactcacaaatggcttgtcacccgtgtgtgccctgatatggatttctaggtgtgttttctgcgcgaagcttttaccacagcctgggagggtgcagttgtacttgcgcttcctccgcgatggctgagtttcattggcagggtaccgcggtggcgttggcgaggcagtcgggtaggatccggcataagtctgtggtgccgggggtgccggatgctggagtggtggcagcgattgctggatcagtaatgaagcatgcttggcctgaattgccttcatcaggacatccacgttggttgagaaggcgagatcagtggtggtttgcttcgtctcgttttttgccccgactggtgaactgtggcttccagtcgagatatgcacccgtggagcatggtcgggagtagacttgattgtatggctgatggcgttcttcgccggacgaatctctggaagagactgcaacggttgtgctgttgtgcgcagtggttgcggctgtaacgggtgctgactatggacaaagtattgctgatagggattcgagtgtgcatgtgtgtgacccacagagtgaccgaagctgtaaggcaagctacttgaggtctggtaatgcagcgagtatgatgctgtttgatgcgaatagaagggaaagttatggctcagggtcgagtctatcgagcgtctgtgtgcaaacgcactcacggcatggccagggaagtcgtaagagacgggctctgaggtctccatcttgatgactgtttgaggtcttcctctcgggatctttcagaaaggtaaggataccttctccctccggatctccaacgagataccaatgtatctcaatgtatacctgtcctcgggatgtgctggggagtttttttttttctgaatagtctttgactatgctctgagacccaatccccggtgatatttgggttctggctggcaacgagttctcagaaagaagcaaggatggggaaaatagacaaaccggccggccaaagcgcaatccgttagatctggatgtatatatgtgagataaagaggagaggaaatagcaaatatatgcaggtcattcatgaaaagcgagaaatataatgattgacaactagtgatgatcttccgcatcgaccgtggcgcctcccgatctagatatacctgcaatggcgggggcgacagggggaggggaggcagnnnnnnnnnnnnnnnnnnnnnnnnnnnnnnnnnnnnnnnnnnnnnnnnnnnnnnnnnnnnnnnnnnnnnnnnnnnnnnnnnnnnnnnnnnnnnnnnnnnnnnnnnnnnnnnnnnnnnnnnnnnnnnnnnnnnnnnnnnnnnnnnnnnnnnnnnnnnnnnnnnnnnnnnnnnnnnnnnnnnnnnnnnnnnnnnnnnnnnnnnnnnnnnnnnnnnnnnnnnnnnnnnnnnnnnnnnnnnnnnnnnnnnnnnnnnnnnnnnnnnnnnnnnnnnnnnnnnnnnnnnnnnnnnnnnnnnnnnnnnnnnnnnnnnnnnnnnnnnnnnnnnnnnnnnnnnnnnnnnnnnnnnnnnnnnnnnnnnnnnnnnnnnnnnnnnnnnnnnnnnnnnnnnnnnnnnnnnnnnnncccccggtatagaaatcgccgggaaggggggggggggagggggggaggggagtcagccggtgaaatagttgaaaagccccatttcgcctgtatgacgtttggtaattcgatttataaaaattgggaaaaaagggggggggaagaagggcagttcaaggccagagatacatgcaactgtgtatagtgtgtctgattcgacgatctccgtgggccggggatcctgggcgattgaggcgacctgactccaccggaaaataatagaaaaagaaaaaaagaattccaatcaaagggacgaactggggttcctggggtttcgtggagctttgggagccctagagagccctggccctgaggccctgaagcactggaggtgcattgcatggtctatgaagatgcattttggacgcatcgattcctgtaccacaaggaatagtaatttctcattagtcgtaatgtattttgatacatttggtgtgaaatgtgtgtcagtcacacgaatatactcgcagccgcgactggcgacgaaagccttcagctcgttcccctatacttcttccatacttccttctctggatacttctgtaactgatattgttgaagagactgacatctgtcagactcataatctcagaaaaagaaaacacgcaaactcatcgtgctgtgcatctcccctcgaggagacgggccgggcctttcaatgaattcgcaagtggaccgtgatcgacctgcagtcgacatgtagattattcagtcgatctcggagtcagcaatcgctcaatggctagctaggccgtaattacgagtactaggatgcgccatcccgatagtcgccaatagcgtccgatctcagcccatcgaatatcctagttagccgcccaaggctttggaaaattcaggctgatctgaatctcctgaagagccaatcaaattgacctctcccatctagtgagatctgtctctgtctctcttttgagccaagtgggagtcgattgtggcccttaataggaggaatcaatcagcacgggctttggattggtgtcgatatatttcccctccccccttaaactgcgaatggcttggctcatgggccatgtcgatcatagctactcgtggtcttagctccatactgggaacgatccgagaaatgacagccatgaccatctgacacgagtaaccctgcacgtcctgcatcgagatgaggtatcgggacttgtcaagaatggttcctgcagggatgcgactagtcctcacgaactacttcctgaatgggcgaaggctagactatgcatacgcattaagcctagctcggtgctttgacgagatttggatcagcatgtctccgtagggggtgtaggggatttgaggtgtttattaccgagcttttgacaaaatattattcggagtattccgtattccgtattccaagtctttcggagtacaaaatgtcggaggctctgtggtgattcagacggacagggatgtagttgggatgagattcagctttccagaatgtccgtgtgaccactgccctttacatctacaacatacatgacaataaaccaggtgtaaagaatggcgattttgaaattgaaaaagggaattcacgtatacactaaagcgcacaaagtgtataaagtaaagaatagaaacaaaattctgcataaataaagcccaccaaagcaaaaacatcatattgcgcccaaaggatcaaccctttcatcgtccagtatacgccgagtatctagaaaacaagtcagcttacgatcctgaaacacactcgggacaactcacctccagattcgtgcacgcatgtctccactgccggtcgcgaacaggttgccagtaggactgggtgcaaccgagatgactattcggagttaaagagtcagagatgataatgcaagctaggattgtatgaaactcaccagagttcttgtggccttgaagcatcatttgggcatttccagtcactgggtcccagaactgaacaccacggtccttggaaccactcatcacccaagcaccgtcgggtgtcaggcacacactgagaacaaagtcctatattgtagtcaaaaggttagcttctgcctatctcgctcaagtaatctcagatctaaccttgtggccctcgaatgtacgaatacacttgccgcccttgacggcactgtgagggtgcatgccccggggaacggtaagctcccagagcttgatagtcttgtccagactgccactgacaaggtcacggccattgggtgcaaacgcgaccgagtaaacactgtccttgtggccatctgggctctctaggcgttctaccaggtatccagttgtagtgtcccaaacgcgcacgctcttgtccaacgagcccgcggctacgtaacggccatccggagacatggccacagtagtgacaccatcctcaatgctaagggtgtagacaagcttgccgtcgagaatatcccaaaggcgcacggtcttatctccactgccagaggcgatgaatcgaccgttgccagcaaagtccaaagagtagatgtcctgctcgtgtccactgaagatatgtttgatggtgcgctggttgatatcccaaacctagagccaatcgcattcagtcagtaatcttcctacatagctggttccatataatctcaagacttacccgaatctgcttatcttcagcaccagtcgcaagatatttgccatccggactgaagcaaacgctgcgaatgtataagtcgccgtccttgtcgacgttttcatcctgcaaggtggccacattttgaccggtggtcacgtcgaagatttgagccgagcggttacagcctgtagccaagtatttgccgtcacggctaaagcgcacacagcaaacgacgctgtcgtggttcaagtgatgtaccagttccacatcgagaacacgctggacctcggggttgaacacggcataccaatcagaaccctcacgcttctgcgacggaggcaaatcatcggggttccagtttgccagcatatttcctggacgttcggctgtgcggccgagaggggggttcggaggagtcgggcgagggatctgaggggaagcacgaggatccgggtaggcgatgtgcgtttgctggggggtaccggggcctgggggaacgcgaccacggcccttaccagggcctggggatgcagtaggaggtggaggcggcccatagcctaggagatgaacaatccaacaggtcagcaaactgggcgacaactttcataaacacaacgacataccgttcacagcagcgccagccggatatcctccaaaggagctctgctggggttgcggcgcgccaggctgagcgaccgaagcaggctgttgaaggggatgctggggaggctgctgatcctggggaagggaaggtgcaagaccggggccactacctggtgggttggtcatgataccgccaaacagattgctggggccgtggcccaaggcaggtgggggagcctgggaaggagctgtatgagccgccgcgggtccgccgatgtgggaagggatagattgcacgccacgggactcaagttcgtgtcgcagcattcggatctcagcttcatagctaaaaaggaaaaatgtaatgtcagaaagggttattcaagctttcaagaaggtaggagggacgaactcttgcttgatcttgatctgcgcctgttccagttgatagaccttctgacggatcatctccatctcctggagctgtccggtcactgcatgatctgtcagttagataacacttcagcgaatgtcggaaaccatggagctgcagtcattgggggaaatgagctgcagctgcttgtatgggggggggggggggggggggggggggggggggtgggggggggggggggggggggggggggggggggtgggggggggggggggggggggggggggggggggtgggggggggggggggggggggggggggggggggtgggggggggggggggggggggggggggggggggtgggggggggggggggggggggggggggggggggtgggggggggggggggggggggggggggggggggtgggggggggggggggggggggggggggggggggtgggggggggggggggggggggggggggggggggggggggggggggggggggagggggggggggggggggggggggggggggggggggggggggggagctcaaggcgcgaatagcccgagcataggggaggggaaacaatatgtcggaaaggagaagataacatacactgatgctcgaattcaccggtgtttcgcgactggctctcaaactcctggcgcagttgatccaacaactccgtcagacgggagttgggagcgggtaccatcccgcgatgagcgttgtacatggtggaggataatttttttcttcctgtctttcacaagtcggagagggacgaaagcgacgttcggacggcaggtctaggtcagcgaataggatcgcaaccaagttttcgacctggactcaatgatcttgatcaccgaggcttcaatgcttggtggatagcaccacgcagctagccacagcgatagtgggcgatacggtataagctggaagatgagaatgggggtgtagcggtaagaggggtggaagaggctggcagctgacactttaaagcgggaaggtttgagtttggggggaaaggcggcaatggttgacgcgtgaagcgaggccatagccgagaagcgcagcgggtcttaccgtaggctactttttaaccttgtatataatactactcctataacaagaaagaaaatgctcaagcaaataacaattagatgagtacttttatacgatacagagatgaaccaaaagatctagttttagttttggatctaaagtacttttgtatagggctaaatacgttcatttatccatatctatgaggtccagatcgtgaggttcgcatgaaactggtattattccaaagatacctggaataccagggaatacttggatctacacccgccggtgcgggcagtggaggtacctctgagtacgggaagccgaagtggaactggtccatgcagtaccaatttagtactgcagctactgtatgtattgtaattttgacttatcatgtgttgattgcctgataagccacaaagtgtattcaggcatcaaggcatcaactgtggcaaaccaggggttcttttaaagtttcctctctttttcttagtacaacgcaggccatgaaggtatagttatgaagtgataggagtgaatttagaggattcgtatagaaactaatataaaataaactactatatactataactccatccactcataagataaccatatcattaacccgcatcagaccatcccccctggatcaattggcttattaagaaaaggtggcatcgcaacggctgtggcggttccgcgctggtatgactactttgttattcgctgcaaatctcctttttcttgttccttcaagtactcctcattcttccctgtctccctccccctcccctcaaccctatctgtgccctcaatcatggatatcattctcgaattatgggacacctttattggtgatcgcctctattcgacacttctccccgcctcgttatcttcgtccgtctcgttgccggcattcgtcaatgcggccgccaacacttcaatggccctttttggtccagaaccttttgtctatgaacaggctacacagatgatttacctggaaccttcgaaatatgcatacctgagtgcttggcccaggaacaacatttaccgtcaatttacaagcttttttctgatcacttggtaatgcgccaattctttcaaatcgctgctttttccgtgtcggtacaatgtactaacatccaattaggctgtttggactgcttgtctacttcttggttgcaacactttcattcatctttatctgggacaagacaacctacaaccaccccaaattcctcaagaaccagattggtctggaaatcagacaggccatggccgcaatgcccccaatgtccctgttgacagctcctttcttcgttcttgaggttcgcggatacgccaaactctacgacactaccgccgacgaacccttcccgtactacagtctcatccaaatcccattcttcatctgctttaccgatttcttcatctactggattcaccgcggcttgcaccacccccgtgtctacaaaaccctgcacaagcctcaccacaaatggatcatgccaagcccttatgcttcacacgccttccacccgctcgatggttggtcccaaagtgttccgtaccacgtcttccccttcatattccccctgcagaagatcgcctacgtcttcctgttcggcttcatcaatctctggaccgtcttcattcatgacggcgagtacgtcgccaacagccccatcctgaacggtgctgcctgccacaccatgcaccacttgtacttcaactacaactacggacagtttaccaccctatgggaccgcctaggtggcagctaccgcaagcccaacgaggagcttttccgcagagagacaaagatgggcgataaggagtggaagcgccaagccaaggagatggagtcgatcctcaaggatgtcgagggcgaagacgatcgcagctactcctccgaaaaaaagaagaatctttaaaacgacggcgctaaatcacattctttacgacttcacaatgcttacttggttctagactacagggatcaatcgagggccactacagacttttcggtagacgagctgtattcttcacctgtgttttgggttgggaattttggatctccccgttggttttcgtgccatttttacgctaattcaagtacattaattcgccttttgcatctcttatgtgttttaatactcccaaaactgaccagcactcttggcttgctggtccacgggtagtctaccctattctgtatataatgttcctttttcttcttttcttctttcttttttccatgggtgatacaaatgcacttgtttagttctctctgtgcatccttctacgtgttcgcaaatttatgtgatattattaagaccgaaacagattcgtatgtatgatacttttataaacaagaaataccagaccagttcaaagttacataattggaattaatattgggaatcataatatacaacttccgtctccatcaagtactccagaccctggtcttcccgagacaaacagtatgattgctgccacctgcgcaggccttttgatgatggtctgacataggggaaaaggctcctctcctctgatggatcgagaatgatgggcacgtgcgctaccggagagttcgtatgatgacacctcgtgatccgtcagtctcatgaaacccattatcagccagatcctgctctcggctcggccagacctccgccctggactgcccagattcagccgaagcaagtcgcttgtgaagagcaaccactcgattagcctggtgagaatccccacactccagcaccgtgagcttggccttcaacttcaatgccagggtaagaatgcggtggtagaagatatcctcgggcatgcagtcttccatcccggagcccaagtatggaggcacaagtgccagcttgggctcaaagcgccgtacactgcgtgcagtggtaccgttgcggaagtccgtttgggatatgtagggcgggttggagatcaatagatcacattcactttcttggtcgggtgatgagatgtccaatgctccgagattggggtgttgtgtttggagcattgactcgatggacgggactgaattgtcactgttatgtccgaggacatcggcgcgatagaagtgtatgtctgtccctgcacggggtgccaactggcctagttgcaggttatgctcgagattctctcgggctaggtctaaggccgtaggactgatatccactcctgttatctctagctcctggaaatgaggacaaagtaaggcgtgcaagagaagtggtatgcaacctgttccagtgcaaaggtcaatgacacgcaaaggtctcgcctgattaggagacttggacttgtcattatggcccagggccatttgacggaccaagttggctgcttggtacgtatacgattcagtttctggcctatgaatgcttgtcagtaagagtatcgatttttaaagaatctgataggcagaccttgggatcaaaacacctcttcggcaaagaatctccaagtcgccgaatggttgatctccaagaatatattggagaggatatcctctagatcgcatgcgacacatagatctcaatcggcttctccatcctgcctttgatggaagagactggctatcgcgaactgcccgctcgcgtagccaacgaagctcattgcgagccgaatcgattgtgcgacattctttaaggagtataggcagaagattattttcccgttgggcttttataatgacagaaaaggggattcggggcattctgggaattcgaggaggtggtcagtcggggaacgttggtgccaagggatgcctatgccaagatatttacaaatttatatacaaattcatagagatctatgagatttaagactaaggattgtaaatatacgtcagttaaccataccagttttggtcatttacattagagaaggactcagttgcttttgctttgatggcttcttcatccctagggatgtggtccttaggatggcgttaggctattgttgatctgcgtggtcgaagggtgtcattgtgaatgtgcagagaattcactttctatatattgatagatatgtaaacaagtgagtaaatgatgaagaagatatctcacacatctagaaggccttcatgtccatacgcgtcaggactcagcagcccctaggctagtctgaagagagctgggagaagtgaatatagctgtaaggatatgtatacagacagttttccacatgcacatagctatattagatcaaaaataggtgctttctatttcataacacgtaagaactcgataattgagagtacggacaataattttaggtatagcctttccaaaccccaaatacaccatattatgcgagacatctacataagaagaaaattaactgatcagccaaatgaaccctagcggttttagaaagccagaagagctcccacgccgacaaggccgacagccatgtgtttcggcatagcggtcgccataggaatggccatattcccagtgacagaggaggtgccggaaagtccggtctctccctgcggtgctccgattcgagcagcggtgccaccaaccgacgcggtagtcactgggttcgatactgcagttgcaccagggacggaatcagtgccagtcccgatttccaaaacatcattctcggtggtgttgaagttggtgttggcgagggagatctcattattggcgagatcgtataccacatatgcgctgcgaaggaaggtatctcccaggactgccgtgctggtccccgcaggaacaataccgaaaacgcaggcccgtttgccgttccggaaatagagatcgccaacatcgatgatcatctctttgatttccacactgatcgtcggggatgagaatgtgtaaccgagggtgatgttcttatctgccatgctgcattcaacatagccaatgccactgtccgactcgtaggagacactgagatcattgtagatatcctgaaccagggcgtccggaaggtatgtaagagagcttcccgaatccagcaacacgcccgcaggaagggcactggaagaataggtatttttgccggatgaattggtgagggaaagtccagtgagcgcaatgatgaactccgaatactgtccgttgaccttctggacgggaactgtttgcagggtgccgtggtatttcttagtgttgactccaccaaacaaaatcgagcctgtactcgcatccagatcgttcagccagagactgtaggcatttgattggattactcctttgctgaccattgccttgggcaggttggcataagccgagtctccatttctgccaacctgaacttcattcgtagtatatcctatacccagcacaccctctgtatacagacatccatgttagctctgtggtaatcagcgttatatccgacagaaatcactcacccgaagagccagaggtaaacccaaggccaaactggaagtctttaatagttgtgcctccaatggtaagggtgtcggtgacatagtctccggcggcgccggatccatcggcataggtgatattgaagtccgagttcacgaatgaatatgaagaggaagagctcgagttgtaagtaccagattcagcgcaggcgtctttgctggctgcacagagagtcgaattcggcgtattgcaccacaaatcactacttccagtgtcgagaaccaggcgtacactctgctccggggtacccagggtaatattacagaagtataaagtttcctaggcagacacattagcagctgcgtaagaattatatataccaataaatagatatataaatagatatcatgtgtacctcattgtccaatgcctgactgacggtcgaacgtttcctccttgcttgatctctagcgacggggtcgagaatatcctttcgttgaatatccatttgcaccacggcggggttatctcttcgatggagggttaaaccccagactggcagcgccaggccggtgaccaataagacccaagcatttttcatgatagcgtcgatcgtcctccccgtattccgcaagtaagggatgagctattcgattttttgaacttcagagatgacgtcctaggtgggggtggttttgaatagagtagcaagtcaagaggaaagttgaagcaaaagagaggtaaagagggaaaaaaagaagaaacgggggggaagttgatatctttccacaaatgactatggagctacctagtcggctccagccggattctcaggtggatcatacgtacaatagatgtattttatatatttatatctttcctgttcttctcgaagatgaacgggtcaggcgggaactctatagtgctgtcgtcaccaagcataagtacaacgtaagtgtaaacgactttgtatacatatatatgtagttgatctaacatctaacataaaccaagtctttaacctttgattcctaaattcaacaaatcatgactttgtacttttcagcgtacgtacgcgatatacgtggtggaggcgatgacgcggtggactccactttcagccccctttgggctctaacggacatgactctaatacttacatattgtacatctcactaccttcattatatattgtaaagtcgaaaccgcctactcgccacttacagacccatcgcatcccggatttgctgcatggtcatccgactattggcccgcgctgcttcggcgccctcctcagccaccgactccaagtaccctgtctgatcatccatgatcgtaatataccgatctcggatttcttgcagatgatggatgattcgatctgcaacgtgttccttgaatgatcgaagacttgcgttgtggaactcagccgcaatatcctcgcaagatacaccctccaggtggcttaggatttcgatgagattagacaccccaggccgacagatcgggtcgtaggtgatgcttgcctccgagtccgtcagggctaccttgactttcttgcggatctcggccggtgagtcggtaagaatgatccgggatttcccatcggcgtgcgatttggacatctttgacgtgggttccttaagggacatcactcgctttgcgggggctggtcaagttaatgtttcgttctgttcgttctgttcattcttccttcgggtaactgttatcttacatatcaatgcctctggtatagggaagatgggcccatagaggtggttgaagctattcgcagtgtatctggaaaactccaggtgctgtctttggtcttctccaaccggaacatgagtcgctcttaatgatcattagcaaagaacggccaatgtagacgagaaacatacttgtgcaaaagaatatcggctgcttgtagtactggataggagaaaagaccaagtcgaagctgtgcccgtgccgttgaatcatcaagggtggcgtcgtctggcagctgtagcttaccctggagagtgtcaataagatgctctttctgtataaattacagggccgctcaccttccactgtgtcatacgcgacagataccccatggaagccaccgtgctgagaatccacatcaactcggtatgtgctggcacctgatgaatgtcaatatgaaatcccgattgtccctagcagccgacagctataagacgagaacctaccccggactggtagaatattgtagagcgcttaggatcaaggcccacagcaagcaatgttgcaaaggcctccttcctccatttcttcaattgggctgggtcttgtggtaccgtcaatgcatgcaaatcaacaatagagaaaaacagcttggttccttcggttgcatcttgttggagcttcacccattgatgcaaagctcctagataattgcccaaatgaggcacaccagttggttggatcccagaaaatataacgggctcttgtgctggcggcgtaatgcttgagctgttccatcgatggcatctccttggaagaagagagagcccgcttggacggatatagagatgttttgcacgcaatggcctcggcgaggcaaattcatgacgcatcgcgttagcagacatctccaacaaacgctaaatcggtgcgagaatggaaagttttaggtgcaattgcttcggactgccgtagtccccaataaccaccgaaaaacgcgaaacgcgagatttatcacgtgatcaacatcgtacaatgactcgtaatattcaaatttcgcacatttgcagaatatgcgagcagtaacacgtctattggggatcagttgtggcgagtaacattcagtatatagaaactttctttcatctgggcttaaatgagaatagtaaaacagtaaaatacatatggcctagatcaagaaggcttttgaatataatggaaacagcgcctgcagcaaagacagcaagtccggatgttcacgggtatacaagttcaacagtagatcgccattccatctatagacgcttgcgctcggcgaatcgctcattgttcaaagtatcgaatatcgtgcccgggcccgagttgtccttccgctgaccgaattgcgcgagctcgggacgaagagcttcttccacctcggcaacagaagcgtccatggccttaccagcatctagtatagagtattagtactctgctcatagaagacaccagccaggcgaaaaaggaaagaaaaaaagtgtaacccataccgagactgtcatgttcccagacgtttgccttcatacccactccataaaacgcatgcttccggaggaatgcaagccatgcctgcaccgcttgtgggtttccatccttgatctgaaccagtcgacggagggtgattcgttcaaagttctcctggctctttttgtgcacgaagttacttcggggtacggtccagcgttcgacgatgcgagggagaggcacaggcccggacacaggaagattgaggtagtacgcggcacggatggcaaaatccgtgaagaactccacgttacggacgctgtatgatcgcaattgaaggtcgcagactgggaggccgtactccaccttcctccgcaaaggccttaggtatatggcttgcacgctgcgtggaagtcggttctcctcaccgaatgctcctaaccgttcagacctaaccgaactgtgagcagtgatctttgatctatttcgactctgagccaattgccttggatactgaccattctttcaccttaggctcggtaatttgctcggcttccatcggtctgcaatgtctcaattagcaacaaagccgaatcatcctagatttgaagggtatcttacgctactggagcaatcgatgcaggggcggtagcggcgggggtagcggcgggagtcgcgacgggcgtagcgtcaggtgtagcggcaggtgttggggtcacaggggcagcttctgcaggagcagctgcggcaggtgtcgatgttgggtcttgaacgggtgtcttctcttgctccggcggagttggttgggttggggatgatagagagcggaatggcacaggcaccttccaaggagctgttagcgtcgaaattgtgagttaaacaaaatgagaacataccctgaggctcgtgctcactccaattaaggagcgcgatgtgtatgagaacattgttaatcgtgattttgaggaagatccgttgttgttagcggatgggttttttcggcgagcgagtccagggcggtgagtggggaacttggggatatagagaagggaccgagacgactgtctccaacggacggtgataactatatctcctcagtttaaatataattaggtcaatgataatccatacgaactagtgtatcatcttttgccgttattatataaatacgtcaattgtataatagtataactgaggttgtgcaaccaattccccatgttaccgtatatagttatagatgtgttctcttgtaggtgatcatctctcttctgacttttagataggatgttccattcaatgggctcaatattagtacatttgacatggctaatgtagtaagtatcccccgaggctgcttatctcgaatcctctccagtatgaatccgatcattggcacccccgccaaactagcgacctgggcaatggaaccatgtgactccgcacttggaaacatcgctttctttcgctcatccgatttctcactttgtatatattctacttctttggcggtttacgacactgaattctgcaaaaatgacaaagatagacctatcctcgttccagcgggcaaacgaagcggttttttatctcagagccaagttgccagagaccttgcaaaggcctcaggtcgcaattgtatgtggctcaggactaggagggcttgcagataccattcaacccgagtcacggattgaattcgactatgcatccatccctcatttccctcgctcaacaggtcggtcacgttcttcgtccttagggaagagtttctaacattccgcagtcgttggtcacgctggaaagctggttttcggtcttctcggccaaaaaatccctgcggtgttgatggttggccgtgcccagtcagcttaagccctcattctgcttgtaatatcacaactgaccttggaatagttactacgaggggcactcgattgatcaggtggcattcccaattcgagtgttcaagaggttgcaagtggatacggttgtctgtatgttctacattacccttaataatatgaagattgatgttacagaaaaacgagaattaatgttgtttggtagtgaccaatgcggccggaggtttgaactctgagtatgctgtgggggatattgttctattgaatgatgtaagagaaaccgtcaaatcctttgagcggagttattctaacactgggttacagcatatattcctcgcaggtttggcaggaactcatccattgagaggacccaatgaagaagaatttggagtgcggttcccacccctgtctgacgcctatgaccttgatctccgtcgccatgtgcatcagtcatggaagaaagtcatatcaccggaaagcaagagaaagttgcacgagggtgtatatgcattttgcggaggtcccacgtaagtcgacacaacacaatttcttttgaatcttattctgatagcacccaagttacgagacaagagccgagagccgcatgcttcgaatgcttggtgccgacgtggttggaatgtccacagtaccagagattgtcactgccagacattgtggtctacgagtgcttgcattcagtttagtcactaacaaggccgtcttgtctcctgtgcctcggggagatgataatttgcttcagaataaagcagcaggagaactgagcgctcttctggaagagggcatggcaggacacgaagaggttcttgaagctggccgcgcggcagccattgacatgcaggtaagatcgttgcatcaatccttggaagacgatgaaattgacatcgatccagaaactggttgtcgaaacccttgtagatgtctttgaccaagtgtaagactgggcttgacacggatgaatgcatatgatgatctcagaccgtgacgacctgggtccaacttattaggactctagcagagacaatttcgtcgtgtccgccacggccaacatggtgttgttgttgttgttgccattcaaggcataattgacaaaagtagataccgaaatctcacttgtttttccgggttctctttgccttcaggtccttgtagaaggacttctttccacttgatttgctggcttgaatgtccctatatttagattcaaagcgcttggtgccacgctcgagtgccaatgtttcatcaacgaaattcttcttgcggtccttcttggtgatacggttgctgaagaactctgtagggccctcgatgatggttccgacctgggaatattctggtggtttggccttgccattttccttcttgtagtgacgcttgggatcaagcacagaacgcatccgaatgagctgtagatctctcttaagctctggggtcatttctgtctttgggaggttgaaccactcaggtccagcagtaggcttgtcctatcaaggtgagggttgttagcaaatagctacaaatgtcgcacaccgagaaaatatagtaattgtgatgaatgctcagagtaactatgaataaaaggctctcattggtgcagcacagcccaagacggactggttacgctgcatcaagcgcttcgcgttgggaatattttcctcatagcaaaaaaaaaaaaggaaaggagagtaagcaaggacgagattgactcacggtgttcgctttcttgatctcaacagtgcgaagagaattagccaactccttctgcttttggtcggtgatctttgcagcatcgacagtagcaacatcatctccctggacaatatatgattccagcgaggacccaggtgacaatttcgggatcctaggaggaggtaagcctagatcctagcacattgatcttcaacatgtttccatacctaagagatgccagatcatcaatctgggtgcttggcgcattgaggccctttagtcgagtctctgcctctagaagcaactgctgaatctgatcatcggtcaggtcttcctgaacatccgacacaaatgttgagtcagccatccctggtgaatagggaggacaaaggctcaagaggtttaaggtgagtggagagaatttatatttttttcttaggtttgcttgctgcttcccggggccggacaaacgtttatgagaaatttctgcttagtgcgaaagtggagttggtatcatgtgacagaactacttctttccaaggtacagttacaagtacataagccgtttccgagcgaagggtcaagtactgttacttatgcgcgttgtactccccgaatagtacagctcatgtattgaaacgttcacctatcagagctatttgtctaaatattcttcccagctctggagattatatacattgcaataaagtaaaacaatgctttacaacaattgaactattttaaattagacctgattagatgcaataagaaacccatattactatcttggatataaaccccccatatcacatccatacattgtataggtattatacaacatcgagctcggaggggtggccccgaggaacgtcagacagctgaacacctctagcttagcacccaacgcgccttgacctggaacacaacaagcttcatatagtctgtgactgtaacactcatccgattatcgattttatatcgcgttcattcgttctttgttcttagatcctccaccccgcctcgccgtatctcacacctggtcgcgtcgcatcctctcggtaccgcccgatacaccccagagtcccatatagctcaaccccaaagcaagcatggagcaatctcctcaaggctctgcgcagcagggcagacaacagccgcagccgatttatgatgttagaaatgggggtcattatggtaagttccaagtttgtcaatgcgctaaagctacgcgccaaaacctggtttagtcgctacctctcggctacacaatcgattcaaatggaagctgacaacatccatcatttataggtgctagcgcagcggtatgtccatcgcggtgagccacgcgggtcttaccaccttcactctacgatgatcatgcggaatgtcttgagtagcaactaatcaagttgggtaaaaatagctctcagcgcaaggttatgcgccagtcgccgagttgtacactggtacctgggccaacgtaagctcctgagatgaccagacaaatatcgagctctgatactcacctgaactaggtaaaccaaggccttcaaggaactgcacgtgatatcttgacgacctactggcaacatgtcatcaaccatctggagtcagacaaccatgactacaaaatccaccagttgccattggcccgtatcaagaaggtgatgaaggcggacccggaggtcaagatgatctctgcagaggcgcccatcttatttgctaagggttgtgatatttttatcaccgagctgactatgcgtgcctggattcacgccgaggacaataagcgtcgtaccctccagcgatccgatattgctgccgctctgtccaaatccgacatgtttgacttcctgattgatatagttccccgcgaagaggcgacctctcatgccaagcggtcgagccaggctgccggtaccgccccaggaccttctgctgcccccggtcagcttccccctgccccgcatggggttcaacagcaccaacatatgggccctgccgactatgcccttggccagcacggtttgcctcaggaacaggagtaccgcccgcaacctggcatgtatcccggagctgttcaagacccaggtgcggcatatggtcagcctcaatcccaaatgttcgaggggatgtacgcctacccgcatctccctccccagcaggtacgtagttgtatatctcatcttcagcagacaaaactaattatgattgtcaagtgaacctgatatcagccaatggtctagtccgtcatttcaatttagttcatacgcgtttcaaggcgagttttggtctattttctttttttattgttcttatttgattcttctattgttatattttcccacgcacggcaatgacaacgctgtagagtggtgattgagcgaccctgatatttctgatatttctgatgtctcgggattattttatatgcggagttttgatcctggccagaaaagaagaaaccacatgtgacattctgactgttgtgtgtgacttactttgttgattgttagcagtatcatgtatattcctacatcttgtgcaataaatcaaatctacctctcttgcaggttttggagtaagccgaggttacaatctgagagacaagagacatcctcagtatatggtaggtatgcttctagctgtatttctggattcccaagaggtacttcatggttgtagtgaaacattgcattacccacaacacaccatggattcatccagtcttcttgaagcgggatgaaagagtcgcaaacttatccaccttagtaggggcttgaacactccgtgtaagcctattcacaaacagttagtaggtagttcatagcaatgagatatactttcgaatcgtacttttcaagcaaaatgggcccttgcatggcatcaacgcgtccatatttcttgttcctcgtggaaatgtcataaaactcatctgcgctgtccgcttgcatcaactgtacggtttgctgtaactcgtcgaggttctcgcgaagaattgggacatttaagctatccacaaattcggcaagatattcaacatcttttgccaatgctgcaactccgttggggttgatttttttcacatctggggacagtggttgcgcctgtatgatctgtcagtaagtccctttttcaattcattggggttcatagaaaacccaccaaaatcatgttagcagcatggctaagggcatcaaagtagatgagctctttgatttccgtcggcaaacccaacaatgtggagttcatgatgttggacaaaaatcgagtcaaggtttgcatgtaattgctcggctctgtgggaggtgtagaagacatccactcatactctgctgtctcgataaggtcatcgattttggaattgactacctcgaagatacgcttctcagctgccttcttgttgcttttaaacttttcagtagccctcaacgcgattgaggtgccggtggaattctgtgatcgggctgctgccaataagagttccagctcgcggcaagctagctcgaagtgttccagattaataagaatctgaacgatttggcctagatattgtgaggaaagacgctctactaaagtatcacagactttttgtgaaaggaggtcatccagatcctgctacattagtagtcgagtcacgggtcttgggtgtgttggttcgagctcacattcttcagtgtctcatcaatcacatttgtatttgcgaaaccatcatttgcgaagaaatagaactggttcaggaaattgcggatgtcaatgcaacacagaggatacattcgggaaaatggtaggatgcatgggaatctaagccaatgatcagttagatctgaataaggatcaactggcctaggctgattcacaacttacacttgctcctcacgtggttgttcggggttgtaccagctgacgttgaggaccttgtcatgctcctcttgggtctgtatgggcatgggcatataatcatccgttgatacaatctggcagtgtcagaatttaaaatagatcgatggaagggaaacagccctacctcctggaaatcatcactgaatctcttcttcagaagttcggcatatttgccaaagagtgtcagcaagaagtcatcaaagacccgcacggggaagttccacgtctattatatagtcagctatttcagcccaagccaatagagatgggcttgcctacattcatcgtctgcatgaacagagcaatcagattcttgatgttgagaatgctctcagcgttgtcaacttcatgaagtgctttcgatattaacactacagccgcttggcacatcgagtcccacagctcatcaatctatttagcataggtcagataattcctagaaggtccctccttgaaaagaggctaaatgaaaaaaggatatggcttcttacgtcgacagatgacctgagatcgggggctcttttcattgtggcccgttcgacaatggcaaatccagccatctcttccaagagattgtgcagactagaaccatcttcatcaacaagggtgatggaagacggaagcaagagctccttttgtcttcgacgggtggtcgcgtattcaattcggaatttatccatatgtcccaaagattgatggatatgcaagcactcgaacagcggtgtgaagtcgacttgcaggtcttcattctggagcaggtcatactcttcatcttcatcagacaccagttcgatcgcagagttcaaattgaagtgttccagataagggattttttgcgctctttgtttttgtcttgttttccgctggtctgtgtggaaaagcgcaatttccccgaggtattgagacatttctcggatgcggtaaagccaggtgttgagatctgacatcactgcttccgcaatggccctctgtgtcgctggaactgagcgttgtatcatgactgcaatcttgtattgtgtcacccccttcagatggacattttgcaattcctccagcgcccgcagcgctgcatagtggttcttctttgccaagaggtcatggacttggttggctagacgcaatacctccaaacaatcctgaatggcgcgactggtctcatcgatgttctgtcggtggccacgcgactcgactagtgctttcttctgctcggctagacgttcggtactggtttgaatagactgattcaagtccagaatttctcctgtcaagcttactgtcccctctctaatccgaaggagtgaattgacagatgagacaaactcctggtgatttgtgttgcatatactttcgatctcggactccttgtcgcccgcgaaccgggacagtgactgcaggagttgtggagtgcggttcccaacactgtagtctctgattgagggaatgagctggtccagatagtctgtgtcagagggtgagataataatctatagggacaagaagtcagtttcgtttaggtacattctccatgttgtagaggctggctcacttggttcaagacatgtggctcattgagcattggagccatgggtggcataatggctcagcttcatagccagcgataagcccaatagtctcaatacttctccacttgcagcttgcaaccttacatgtatccagggatgatctcaagcttatgttactcgttgacgtccgtaggcggtcaaatgttcgatctgccgctttctaaaaggctaatcccactctgtactagcgttatcactagcctgaaccttagccatatcaagtgtataacaatcttccttttccttccttttcctttttctatatgccatggtctctttgttctttagcattgttctaccacaatttgctcaatattcttagcagccgagagactatgggaccaacgcatctgataaccaccttatttacaaagtaagacagagagcagtgatctcccacactgttgacaagcgacatgaaacttctcattgagaaagatatgaattggatgattgtgatttactatctatggctggtctgtaattgtgaacaagattttttactatgatagtatcgctgatgaaggatcacagcgagtcattccacgggccttgtatgaagattggagacactgcgatagtgaaggctactagagaaccagcaagataaaggacgactcgtgcgctcaactaggctatattttactttcattgggggccaatcattgaattcttgttgggacttcgttcgttcgtcgttcgttgggatctattcagcaatatcttggtcgcactttgtgagtcgttctgctgcgctgtggtcgaactcaatgagtcgctctgtcgcggtatcttgttcgcacgcaatgagtcgctctgccgttgcacaatcacatcgtcccattggttctctcgaaacgtatcccgagtatgagtcgcggtcttgacatataaaagaactgtgcccaccaacgattcctctcttctcttttatttcccgtggctcttttttttaaaaataatcttgctgccatttactgctactttctatcactagggtcacactgccctttcctcgctgcttggactgaacaacttgctagcttgtatgtctacatgtctttctaatatgactctcgattcctgaccttctcattgatttagtattgaacatggaagggtcttctccaactcgaggatcgccatcgaagcagcttactgcattcaatccgatggggtatgatgctttcgctcaccgagccaaccctggctcccttcctggaatggcgaccattcgtccgactaggtaggatacttgtcctggttttatatattgatgatccaagccctaagtacgttaatgtgttatagtgatccatttgctggttggatcgatgagaaagggtctgcgcctagcatcccttcgtctcaaactaccactgcaagctctgcttcttgctatgcctatccagtgcctgctaccactgaccatgcgaacactcgcatctcaggcaacgagtacaagtactcgcctgtttcgcctcgggtgacttgcacccaggcagctcgcgcgtcaattggcaaattccagccctcgcctgtctcaccccaggtgtcccctgcaggagctggtcccggtggaatgctatactcgccttcccatgcccaggcatctcggtcactgaatcaaactcaatactcgcctcattcgttgactcgcgctcaggcgcgtttggcatctgagtactctcctgttcaggcaggtattgccaatgttcggtactcaccatcccgtgacgacattaactatgaatacaatacgacaccggattttttatctagattgctcgcagccgctgattctgcagtcggagataccaatgttgcctcccctaccaatgcactggcccatatctcccccagtaaccaagctcgtcgtgccactggtacaaccgacgcgtctccacgatctcccgccgctgggactaatgatgttgttgagaaacatcgcagctttattgtgcagcatgtccctctcgacaccccccaccgctctattgctatgatgttcccggtaagttacaatatgatctcatgggatggaccaaagctgactttaacaagatcgaggaatatccttcccttgagactgtttgtctcaagcaccttgaggctaggggcgtcttttctttttcgtttggcgatcttcgggaggctgtccacgccatgaacaaaatccgcctaactcgtcctagctggcgcgtcttcccggccagttacgacgacattgccactttcaatggatccaatggatccaatggagccgtttcctctgtctctgtgcctcagggtggtgcatttctgctttctgtgtacaccatcccaagcaagtggctcgtggaacccgtggaagagattgtcaaccaagtcgtcgcttcccttggcaccctgcgctcttgcaagcttaccgagaatggaacgagcatgagtcgataccaagtcgaatatttcaacaagcgtcatgcagcttatgctttttcctgcctcggtgggttcaggcttgatgtatgttgttcctttttttcctttttcacttgcttttgtgttctttgaaatgctaatattgggtttctgcagagtcttcatttcaatgtttctattgatgcacgtgaagaggttcctgttttgcctcgctatcgaactgccagctttggctcccctcggagccctgtgacaccgtaccacctcgtgtccaaggagaacgagatcgacgagaaggttgacatctctccagtttctgatgaaggtcagacgagtggagagcatgctattgaccttgaccgaatcaaacaaggactagatgttcgcagcaccgtaagtcttctcccctctgctgcaagaccggtttctcacattttgtctcgttacaggttatgatacgcaacattcccaacaaaatcacttcggtatgattatctccgttatcttatgaaaatcaggaaggctaattctatcattcaataggaccagttgaagaccatcctagacgagtccagtcatgggaagtatgacttcctctacctgcgcatgggtaagtgcttctccatggtttattgtcttgttcatgctaattcgacccacagattttacccatcattgcaagtaagttctgattgcttgataattgttggcttccaattttacttaccatttgtccttctagcgttggttatgcgttcatgaatttcgctgatgtgagtattttttgctggccttactttcgtcaggcatccttttcatctgatgtctcttttttctgacattatactaacataatttacaggcaattgacattgtcaatgtgagttataccatgtatcagtgtgtgacatctacttaccaattttccttagctcgtacacgctcgagagggcaaggcttggtatgctgcttcctatcttcccccaaaaagtgcattttcgctgactcgagacaattacaggcccgactgcatctccgagaagatagctcaagtttcttacgccagtttgtgtcccatccatagtcagtgggaatgatatctaacaagtttcaatagcacttcaaggtagggaagctcttgtgaataagttccgaaacagcaacgttatgacccgtcctcatgaagagcgaccccgagtaggtttaagctttcacctcccccccccccccccccccgcccccccccccgcccctccnnnnnnnnnnnnnnnnnnnnnnnnnnnnnnnnnnnnnnnnnnnnnnnnnnnnnnnnnnnnnnnnnnnnnnnnnnnnnnnnnnnnnnnnnnnnnnnnnnnnnnnnnnnnnnnnnnnnnnnnnnnnnnnnnnnnnnnnnnnnnnnnnnnnnnnnncatgaagagcgaccccgaggaagtttaagctttcccctccccccccctccccccccctccccgattccggtgccggtattgactgaatatagctcttccatgtcgatggcccccgtgcaggcaccgaagcgactttccccggccccaatgatgccagtaagctccgtcgttcggttgccagcaccactcagcaaggtaagatattgtgccctttggcttgtggacgtattctgaccctttcacaggcctctattcaccccggaaacgagctcccagtacacctcgctccaaccgcacgcgtcctcagtctggatccttcaaccagactcctcggtcccagcccttgaaccagactcctcggagtcgaccatcgtcgatccgcactccccggcagtctggcggacgctcggtccagcatggtcctggcgagttttctccgatgaagtcatctccgttgaaggcagaggaccgtcaattcaagccggagaaaaattaagctcctcctacaggggctatgcgaacgggtcatactgcagcaactggacatgacattctgtaagccaatggttcctgaccgatcagattgtttcatacttacacaatgacaggcacagagtctcgcgaccgctttgtttattgaattatccgacaaaatccaaaaaataacgaaaaaagaaacaaatccgacagatgatgctacactgacaattgcatcctcttccctctttgctccttcaacatcctcgattgttcctctacgccacgacagagggactcattcagaggcaacggcaaagggaagagttgctcagaatggctctgtgcaagccttgcctactcgctgtttcaaagctgagattgcacatttcgatggtctttcggaattgtgcctttaattgtgatctctcacgattcattgctcgagcttttttcccagcttttttccttttcatggcttctgcgtctgctttttattcttactctttctatttcgaaaatccgaaaatccaaaaacaggggatggagttagtcaaatgaaatgaatagttagttattgtctcccagtcacttacaaagtagacaggtaaaaccgtagaatccacgggaaaatcttttcatcttttccatctcaccaaccatggactccaaggaaattctggaagtccactcaatgctacatctgatctttcatcgcaacaagaatcaacatcgccgaacaaaatggtggaaatggctatccatcttgaaacgcgccactttggattccgcccgatcgggggtgaccactcatctggccacgcacgtaatcccaagatgttacatgtatgataaaaagaaaagtcctacgtggaaaaatcaagctaactgtattcttagcgctttctcaactgtcgttaccgataaccagttctcgacccttggaatcgtacttttagctgcgttggcccgactgtccaaagtcaccgggatcagtcaccagctgaagatgcaacctgtgacaaggtccaagattgctcctgtcaagaaagatcgggaagatcttggggaacgcattcgtcgcattgacaatacgccagtcaccccggtcaagatttcccagtctgatttcaaggtccccaaggcctccaaggtttctgagaagcccacggaaaggcctacagatgacgctgtttcaaaaagtacatcgaaaaagaagaagaagaagaacgctattgatgacttattcagcggtttattttgaatctcatacccctcttatgtacagtgttttcttttcttttgcggattccaagggatgtccaggcatgtattttgaagctaaaatgtttatgaagaatgacgagatcgcgatcgagagaaaataacctcgcccaataaattgacaccaacatgattggcagtggcccacgccatactgtagagatacttgggcgagaaaacggtccagatgaaaagatgcgtccggagggctgtacaggcggccatgacagaaaccaaggacacggcaacatggaatgtcaacagtgccgaggggtcttgtcctacgggactcttcggccggagacgatggctttgtgatgcccaccagataggccctgcccagttgctcgcaaaggtgagaactcccaccaacaccacgctgtagctgtcaacaccgttatatccactagcaaggtctacagaggagattgcattggatccgccaaacgcgaagaacgtcatatattggaagatcaaggttgtgattgtcacctcaatccctgtgaggttcatggaagagagaatgccggcctggattcggaaaatcaggaacagggggacgttagtggcacgggactgcgtcattaggaagatgtgcagagcttcatggattgtatcatatggtactacagagtctggtcagtaatgacctccaagctcagaggcaatctagcgcatgtgtgggcttacctcgggggactcttgatcgttttccggcaaagagcgatagtaggacaacgacagcaagtccgtaaaacacgagcctggcatgcaagaccaatgatagactgtagggccattccttcatgatttgcgagatgaatgtcccatcaaggagttcgggcgattccgaagtcacaaagtgcaatttgaacgtaaaggccaacgcggagggggccaagacacctagcctcaataatccagggattggtatactcccgagaagatgacgaccggcatccacgtacgcgaggataaaaagaccccagaagatttccgggtggcgtgcaaagaatgtgcgagcaatatcaggctcggccgcgaatttctgaccagtttggttccatcgtcgcaagagccgctgggtgatggcgagcacaagaatgatacatttgtcagaccaatataataataatccagagcgtttgtgtgagagcggctttgcagacgattgcgatttcatgtgcaggtagacaatccaccccgagcagatccaataccagaactgctgctcttcttccacatagctactagcaaacatcatcatcccacaggtgatgatcataagcgtcaaaaacatcccggaagatccgtgacgtgtgcattccttgtatgtggccggaaggacaagcaggcctgcaatccccgtgatcaacaagcccagaatgagtctggagacatcgtagttactggcagtacgactcataacttcctgtgcaatccttaaaaattgcagcaaatcggggccagctgtagagtaagaatcatctgcttcatccctacctgagagaagttgctggactcgagcccacgcacattgagctccctcaatacctgatggaagtcctggagcacaggatgtaggactatcggggccaaacgtagatccagggaatgttgttgtcaacgtgttcagcagctgctcagcattttgatataagattcgaagtttatgagaacctgttcccgagtcagttccggatctttcttcgcttggacgccattaggaatagattacataccatgatcccacatctctaaaaattctgggatgaataccccaagactgtttaaaggaattgggataccaagaagccccgccaaggtcggagcaatgtccgcctgctcaaccgtttggtagtactgcatatcacccgacggttccactgggctttctcttcggccacccaaggcttcaaacttgggtgaaatgaaaagtaacgcgggggatgtttctccagcagatgacccgccatggtttccagcctcgttcatgccatgatctccgcacaacacgaaaagtgtggattgaagatgatcttgttgctgcattgcggtatagatttcagtcaccacagagtccatctcgtgctgtttcggtatcatgaatggactaggagagttagaggatagagagcagctaataatgaaatcgggagctgaatttaccttttggggccagccttatgtcctatgtgatcgagacctaggtaatgcattatcagagcagaccagtcatcctgggcaagctcgtgaggaacgtgtcgagtcacattatggtctacttccgtgaagtcctgcgaggagaatctcagtttcaatactaatactgcggatacacaaacacctaaagtacaactgaccgacacgaagaagcttgtagttccatcagctcggtcaaacattcccgggaagagcttgagccaggtatcatccccatacatcacaagccgtcctcctgtagccttcaattgtgccaaccaggtgtcctggtatgccagtgttgacgaggtatccgattctgcgatattgagaataacatctagaaaagatggaactgaaccagttgtgatagcttttaatcgaggcattgtgacagttggagcgcttgcataggcagtgaatggcaatgcagcaccggaccggatcaagctagtatccaatcagtcacttgtttcgaacgaataaatggtgtatttcaaaagcgacacccacctctgtgtaaacaagaaacccgactcgttcgaatatacaaagtcgctatatgtgagcaccttgttagttactgatatagctcggagttgaattattcaaatcatacctcctcagcgcatcaacaaccatgaagataactttatcaaaagccgcaggcactatgacattctggcctgtttcatcaaaagtcgctaatccagggatcaacggtttataagggaagaaccctgaagagaaggtgagtatgcccacgggcaccagcaaattggcaatgactgtcgtccaactgcggaagcccgccatttttgcaaattgacttgatgttagctctggcagaacaaattttatgtaaagagaccccgaatcagctgcacctgtcgaactgtccgggggatccaaagggaggcagaattatatttatgatcgtcgcgcatcaccacaccgccttctcgagtaccttgtacaacattaggtatagttattgtaataatactattgacattagttcaaagattcaacaatcattcaggggctagaacttaacagcgccggatgaatgcatgaactagccaactgatcttgactagggttgcttgtcggtgaattaagaattagatctacatcgaccctgctccagccacagtgtgctagggttgcttttcttccactgagcaaaatccaatatgtcaagctttgaatgaaaggtatggtatatcaggcacagactataaaacatatgtacgtgaattgcaggtgtaattgtagactcccaaacgcctttttcttctccgccaccacatctcgtcaaatccattcattgccctcactcggcacaggcctcacttcctcttaggtcccttcttggtcgtagatagacgcttttgaaagacaatcgagttgcggggcttctggttgcgcttttgcacacgtgccggcttcttcttagagctcttgattgcgtcgatatccatctctgtgttgggtaagcgttctgcagttcaaagcaaaaagtgaagattcaaatgctggattgtcatagactaaccttcactgtcaccagtctgagccttggctgcttcggctaatacggaatacgaagttagtcggtatccttagaagagggatggtagtatacataccagcctcgtccaggtccatctttgatttcacaggagcttcaggccgtggctgtgatgcaagctcctgtagtttggcagcgagtctctcggttctggcatcaaccagtgggccaaagaccttcttgcgcagattggctctgttgcgcttggaaacgctggctcgaacacttttcgccattgtatgaggatagaagaaaaggataatgggaaggataaggtaaatatggtatcaacacttgaggatatagaccaagacgtcggatgggaaataaaatagtcaactgataacacaatcaacttttttttcccccccgataggctcgtcttatgtcatccggagaccgcacttcccaaggtacacctccgaggctttgtcgacttgacctcacccttttatggctggggtttgtggcctttctctaacatttcactccagtcaagagatgtatcgatgcagaacccttacaattggcctggctgaatcggacccttgtctttcgaggaaccctgaaccaagtccaccttgattgctttcgcactcctcttatctgtgaagcagtcatgtcgaccagcctgtcgtcagaggtcgcgacactgacagcctttatcaagccccttacaaatccgcaactgaaagatttgttgaggtatgagggcctccaggtatccgggttgaaggcaaccctacagtttcgcattatccaacgttcgtcaactctccctaactcttattatgacttgttcatttgatcttcaaatctctgcttcacatcccattcttgcagcgatccgtacattgaccgacgatataggaatccaatctctcgcagaatctgaccctgtcagtttcgatgctctagctcggcgcatccgtgctactgcttttccaaacaccgtgccgtatcaatcacccgctagaccacaataccagccaccgcctgtctctcaatctcctgcacaggctcgatccgcgccgctcggggtttccatgtcacctcactcatactctggtccgagtgctcctctcatgaaacctcctgcggccgctcataaatctccaggtcctttgattttcaaagaaagtccattttatacaatcctagagcctttgactgcagtcgtggaatgtaaaggtatgtcactatctatctgtgaagcttgttgagggtctatgtctaattttacctagtacgcgaacaaacgcgggatagtgttgaactgaaggtcatgctatctcagcaagttgcctataggctgcaaacggactcaaatcttcgagtgatggtttattgcgccggtgattcaggtctcacacaatacaccaagtcggatatcgcatttccacatcaagtggagctcaaagtcaatctcgatgaagtcaaagctaatctcagaggcctgaaaaataggccgggcaccacacaacctgcagatgtgaccaactggatccgtaaaaagccaaattatcctaataatattgtcatgacttacgcattgacgcaaaaggttgagcttgttccctttatactcgatagagcatctgttaggccggttgactaactcctgtttgcacagaaattcttcgcgcttgccaacctcgtgaagcagcatccgactgatgatcttgtctcgcagttgaagacacggaaactcatctcgaaggagcaagtcttgcgcgaaagtaagatcccctcctattcccttgggtcagactatgctaatttcgatcctcagtgcgaaatcgcgcaaatgactcggacattgtcgcgacatcaagtgtcatgtcacttaaatgccctttatctaccctccgcatccaagtaccctgccgctccattgtttgcacacacaaccaatgctttgatgcgtcttcattccttgaattgcaaaaacaagcaccaacttggacctgccctgtgtgttccaaatcaactagctttgagtctctccaagttgaccagtaagtctaaacccccttcctcggcatatctgtttcttttcctaactggtcgtataggtacgttgatgacatccttcagtcaacgtcaccagataccgaccaagtcatcgttgaacccgacggcgtatggtcaagccccactgattccgacgcgacgaaattgggagggatgactcccgcgtcagatgacgatgacgacttgatcgagatcagcgaaccagggatgcccgttgtaaaacaggaaccgggacccacgaccgtcgccctggaacgaacacctgcacagtcacagtcacgagaggcatccaccccgtcctccgcgatgcgcatgtccagcaaaaaacgacctattgctcaggtcatcgaccttactgaaagtggtgatgaagatgacgagtcccctcttccacctcctaaaaggccagctacaagtctgccatcccgggctttttctcgtcaggattaccatgtcccgcccgccagcagccctctgaatggcgggtcgtacccaccatgaatttcgattcttatcctagtcaatctgacgaccaaagccttgatcgtttctctttctgatgcatatttccatggagtttctggcggggtagggggggagtcttcaagatatcacaagtggctacgtatctaggagggattgattgtatcattctagttttgaccggtcaattagcctggaaatatatttgaccatcactcttattcttatttacaaataacacaatatatgtttcttaactattttctcgtatagatcaaaaggccaatatcaggtggattccggcctggggttagcttagactccccaacacccccccggaaatccccattttccagttctcatcaacacgccctcattctgtcagccgggtcccttattcattcgcctcttccttagatcctgtcacctttgactccataatgtcattcgattcaacttccccgtcaaatgccgatccaaatgcccgcgtcttcagctcctcatgcttcgacttcctactcatagaattggtgccaatggccgagcgtatggcaaaggaacttgcgacggagggacaggaagctgaagatgaagaagtgagagagacgatattctttcgtctagagtctctgggctatcgtgttggtcaaggccttgcggagcggtaagcataaacatctccttttgcagcccctttgcttttctcttgcagtcctacagcgcgctaaaccgtgtcgatctctatagcttcgcccgagatcgccctcgatttaccgataatctcgatgtgatcaagtttctctgcaaggatctgtggacggtcctattcaagaaacaggtggataatttgaaaacgaaccatcgggtatgtgcaatacagaaactgctgtgttggggagatgcgacataaacagcacttgcacggagatgtttaaactaatatcaataaatagggagtctacgttttgacagacagcgcgttccggccatttggtaggatgagcatggcggtgcggactgaagcaatatccatggcgcaggcagtaagcatcccctttgcaattaatgaggatttctcggcttatgggttgacctagtacctctggtttccttgcggtatcatccggggcgcgttagcgaatttgggtatcaacacgaccgtgcaggccgagacctcggatctaccaggtgcaactttccagatcaaaactctccagcctcggccttgaacatgaaaatggttgcgcctgggcctgggctagcccttttactcaaccaatttacgcctactcttatgacttatgacaattccattttaccaagaccttgtggttcctgcgatctactacaaggatcgttgatcgatcatcatctaagtcgattggctacgtgagacagaataccgaaaacacgcaaaaatgaacagtggaatctgaacccttgaaattgcaggttggttactatatctgtgtgtcaaacctacccatctgatttcgggccgtacactactcgtgtctgctcattgttcataaactcatggtctcacatttaaagcctatctttccgggagaagattgattagcaacgctctgccattttctagtgtcatcgcagccgtggagaaactagcgagaaatatatcgacacaaagaggcccacccgatatacatggtgcacaacggacattggggggagggaggtcttactttggtggggagttcttagcgaactcaatgcccttctcgatgttgccctggagtcccttgatgcaagcctcgaggagcttcttctcctgctcagtcacgccgtcaaggatgttaatggccttctcggcaccgttgggctagatcgagcattgtcagttagttgttttaacacattggaaaattgaagacttacaccgagttccacgggagtggagaagaagtcaagaccggtggccttggcaatctcatcaccgccagcaacaccgggcaggtagacgaaagtaggctcaacaatgcccttctcgcccttggaagccttgatgatagcctcggcgaatctaatatttgtcagtcaccgtggtagctccgggttagcaggtgaaacatacctgaaaccggcaaaggccatagacagagtagcggaaccagcaccatccttggccttgacgacctcgtcacctccgaattggacacctgtgaaatatcagtaaacgcctcccacggaaagggctgttcacatacgggtaacaagagcatcgtatcggtcagcagggatctggaagctaggggaaaccttgctgaacagaggaacaatggtctcgccagagtggccaccaataacgggaacggtggcatcagaggcattcttcacgccggagaactcctgagtgaaggtctcggcacggacaacgtccaaggtggtcacaccgaacagacgcttggggtcgaagacaccggcagccttgaggacctcggcggcgatggggactgtggagttcacagggttggagataacgaggatgaaagccttgggggcaaactcggcgatactctcgacgaggcccttcacaattccggcattgaccttgaaaagatcatcacgggtcataccaggtttgcctagatgttaccatatacgttagcaaaaacaccacatcccgatctgtggataatctactaacggggaatgccggcggggatgacaacgacgtcagcaccggtcagagcaagcttcaatccatcatccttggggaggtagccagtgattttctagtcaaattgttaacgggtttattatgatgcttcaggagtatacatatacgtacggcgaccgaggagatgtgagagagatcggcagccacaccgggggtgttgacaacgtcatagagggccaggtcatccacgagaggggaagccttcagcaagagggagagaggctagagggtcgattagctgaggttcataagaaaccctaggaaggataaatgaggtggggggacatacctggccaatgccaccagcagctccgagaacaactaataacgaatcagcaaatgatagacaaaacggctgaataacataccagccttgaccatgatgaattaaatgcgtgtatttgtagagaaagagaggaggagaggaagaagacaggagagaaatggggaagagagaagcttggagaggggaccggccgatttataagaggggcaagtgctgagaggggcaaccccggaatactggaagtgttgatgttcggagttcctaacatgtgaagtgatgaggtgacgatatgcacctttattcgacttgatttgcctttcgacttgattttgctcgctttgactatcttctactattttggactgtgtgagatctagtcctccaatcccccatgtcctctcatcgctctataaagaatggccaaggtaaaaagctatagacctttctccagactctccggcaattctcgtcccttgacctggacagttccacacttccccggggctaccgggttgttatatcgggaaaaggcggactataattctcatctacaaccggacattgtggctcggcccgaccagtcggttgtgaatcaattttacttcttcccttggctagtttctcttccgttccgattagcagtaggaatcgttctttccggggaggggtggggggagatgatttctctcgctttagaaggtctcagacaggacacagattttttttttgctgccctcggagcaagattgctagattacatggtttccaagttcagcatggcgttttacatacgcctgtcaagtctccttcccagatctcagatccttcatagtccacaattcagccttatctcgagaaaaccttactcggactcctcggccttgcgggccttggagccacggggcttctgggcaggagcatccttcttggggagctgcgagcggcggacggcgctcacacgggcgacggcctcctcgcgaagatcggcacggtagttgttcttagcggttctgtcggcaacacccttgtagatcctgtaaagcagataatgatcagcactggatcgtgaagaacaacacacaccatccatgtcttgaaaaacaaaggaatgaaaaataggagccgcttacttgcggttggcggtgctgggaccgtaggtgacagtgaccaagttctgagcgggctgctgggggttgctgggcttcttggtgatcacggcgacaccgttctcagtgggctggacaccgacggcctgaaggtaatataattagcgccacaaatctatcttatatatataacagggacaacatcagcagtatagaacttaattaccttggtgttggaataaccggcatactatagagcgccaaaagagaccgttgttagccatgcattcccggaaagaaacatccattccgtctaatccccgaggcccgtaccttgtaggagtgcttgttcagcaggttcagggggtcccgggagaactgggagccaccgccggagttgcggttaaccaggaaggagttctggttgcctattccaaagattgatgagctggagttcggtttccaaaagctttgacaaaaattcgaaatgaaaagttgcggagggttggacatacgggtgatctcccagaccaggtcgttggagatgtttgaggacattgtgatgagaggggatgttgagttggagaattgaaagatcgaaatcgctatcaaaaccgtcttcacgtcgatccaattgtgtgtcttgaatgccaagacctcggattggacgaagtctcgctaaggcggctactttaggaataggctgagtgccttggtgcctgatgccttgatacctgaatactgctgcctgtcaaacaaggcagaactaacaacttccggcgacctccaggctgccaataatatgaacgcgatgctgacgttgccccctccaaactctactttctagtgatctcctatgccttcttcatcgacggcttattgcctgatggaacacatcatcttttagtccttctttggcaaagaactctcgagaggcgccaacttctccttacaccgcaatatactactactccgtacacgcccgaatcttcaccggtatcactcatcatcatgacctacattctcttttatttcctactcttttcggttatcatcagcgggacaggtaggtcaagtgtctttccaacccgggaggaaacaaagcaatcattctcaacggatgtggttctaattacactgtagccttatacctcactcggtcacgatggatgccgttaatccaagtgcctgattatctctatcaccgccttccttcaagttttaccgccgatctcgaggccggtctgagctcgtcgcaattcgacattactgccaatcttgcagacggggattcgagggctggcttggatcaacgagcaaagaaagaagtgatcaagattatgaagagtcagaaggtcgattttgatgaagcacggcgcatctacacagagcaacgatttgcaaagaataacatcggaccggacggccggccaagggaccctaaattcgtctcattttcgtgatttgccttcaaccatatcaccagtcctagcgtgttttgtggccattgtcagagcggatctctcgctagcagaatccgtacaaatagaggtcccagcttttgaccggtaatatctcatctgtgctgtcagagcgctaggggtaattattttatcacttgagcgggcggatatcttgtgtctgaaatgatccttggcaacttaaacctatggagttgacgtattatcaaaatcaaatacaacacgtctgtctgtctcgtccgtgtctaagtcacttaatattacatatggccattcagcactgccaatagccagccagcgccaaggcacatttcgatccacctcctcgcacccccataaacatgttcaaggtagtcaagcaggagaagaacatctaacgcatggaccacgctttggtcctaggtcgggaatagctttggggaggagaggcgctctcaagactgaaaaccactaggaatcatcgactgcctgcatatccgggctgttggaagcccggtggcaatgaaggggctcccgctggaggtccaaacccaggtggtccaaacccagggggagctgcagcttgtgggacgaagggcggttgacctgcaccattgaatccaggtggtagaaacgtctgtggaccaccgtagccagcttgggaaggcggaggtcgagctgggagcccgggaggtggggtattgattgaagggacgggaggtggaacatgtcggtttggagggggaacggtctgatagggcattggagggggtgcactctggtagggcatagctggcgggataccccggttcattcctagatcgggtgtttgtgactgagccgtaatcaatgggcgagagctatcgccgttcgacatggcaggtgttgctgatacgcccggcgcagcgccagggaactgcgaaggttgctgaggttgttgagtcggtggctgtacgttgtgtttgcgagcctgggctgcgagcattcgctccgcttcatccccatgtctctcgcctttcccatctttcttgtacgcatactgtaccgaaacctgtttgttcatcaggtactggccattcatgttggagatggccgcgtccgaggattcgaaatcggcaaaagaaacaaatccgtatcccttagagagattgttgtcatcacgagcaatctgtaaagtaatatgaaaaagagactgttaaaaatttccatcttgttcgtattgggggagatctcactttgggcggattgacaagattgccaaaccggctgaacgtatcaaacagaacctgctcggcaaccataggatccaggttacccacaaacagctctgcgccgatttccacggtcttttgtttatcggctgacgctttgttaacgcgaataggcttgctatggagacggattccattcatgatcttcgatgcatattcggcatcttcctcgctgatgaactcaacaaatccatacccctggtgtagctgcgtgacccggtctttgggcaggtggacgttgacgatgcgcccaacctgtagcatcagctcccatacaaggctgtccgaaacccgttcatcaaggtttccgatgtacacggttgcctctttatcttgttccctggggtaagttagcatcaggtccctgtggggaggaaagaaggtcttaccaatgtcttgcgttagacatggcgccggtgtattagttggagggagaggggagaaaaaagctccccctagcggaaaaggactcaaagatccgagaaaaagtaataggttgtgaaactctagcgaaacctggaccaacaaagtagactaatttgagtggtagtagagaggtaatgaggtgtgaaagaaagtgttgaagtgaaggaaacccggagttgagggatgatcagtgacctttccgaaactttttgattccgcaaatcctccctgttttccacttcatccatcaaccacatttcctacttgttcacttgaatcgaccgtgaaccaatttcaatttattcgtgttgatctccttgaaacctttccaaaatctactttcataaattcacaatggttcaattctccgaggagaccaaggttagttacaaccccgatcctccttgagaccgggtttctaactctcgctttttgatctatttaggagcgcatctcgaaggtcattgatatttctcgggtcgcaattcactagtgagccttatagcacacctccacgccatcctccgagctgaccggcgataaccatctagcggatacttgcctctgattgtctatctaggtatgtatatatatatgcctttggtattctcaacacaataagttaacaaaacaacaaaaacaggctacacctatagcgagcccaagccgacattgttcaggtacgcttcaactccttgaattccagctgtcatgactaacttgatacctagattgttctcgcctcttgcgtaaactgcacgttgaggatacgcggatcggatggatatggcgcagtatattgttggatgacctttcaactattccctccgggagggatggtaggttcgaatatctggataatcactgtttgcagcttgtgaaagctatatgatttttgtaattttaagtctctggccgaatattgtccattttggtacagaaatgctgtgtgatctgcgataattccggagtaaacaactgagctttgtataaaaaagaagaaaatctggaggtctggagattaatgtgtggcatatgttactatacgctccagggctaagatctacggagttactcggcagtcacatgttctgacattattattcttagaatattctccatctatcttctccctcctctaacattgttctccacacactctcttcctctcgtctctgtctctgtctctgtgtgttcgattttcctagcttcgtctctaaggcaggttcatgactagtcaagatggcctctcgtcatcctttgtggagcccgtagcaggattcacagcgggaatcgtgtcaactctatcgctacatcctcttgacatggtcaaaacaaggctacaaggcaagcatcgatattatcttggcgctgcttggggtatagaataactaactccgtcttggtatatatagtcgatcgatcatcttccgggtttgggacttcactgcaggtcattcgcaagatattctatcatgagggtggctgtgccgctttctaccgaggacttacccccaatcttatcggaaattccacaagctggggtttgtacttcttatgctacagcagcttgaaggatactattcgaatatatcgcaaggagagcgagcagattctcacgtcgtctgattatcttctcgcgtctggaagtgcaggtatgcacatgtcatatctaattcagcatcgttcctccgttccccaattaatctttggatttccataggcgttattacgtcggtcctcaccaatccaatctgggtgatcaaaactcgcatgttgtcaacgggttcccatgctccaggggcatattcttcgtttgcatctggagcaaaacaaatataccaattggaaggaatacccggcttctaccgaggtctcgtaccagccctctttggcgtcagccatggtgcccttcagtttatggcatacgagcagttgaaacttttcaggttgcggtcgatgaataacatgggctcaattgagagcagtcgcttgggcgccgaacgggtgctgggtaatgttgatttttttgccatctccggtctatcaaaagtcttcgctggcagtgtgacatatccttaccaagtaattaggtcccggttgcaaacttacgaggcccatctgatttaccgtggggcgattgatgtcatttcccagatatgggcccaagaagggatcgcaggcttttataaaggtcttggtccaaatctgttccgggtacttcccagcacgtgggtgaccttcctggtatacgagaatactaaggtctacctatcccagctggcacaaaatccatgaaatacttcctgctaatccctgcccattcttatatcaattgatcctactggagccttggatcaggttagcaacgtcctgtatattcatcaatttataacatcttcggctgccatatgccgatctctaatcttttcacgatcttagctgaaattccgcagttaaagtactatatataaccagataaatgaaggaaggattctaaagtatagtcacgagtatacaattggaataagtaaaagtctcaaaagtctatacatgttatagcaaccagaaaaggcccacttccgtgtatttctttgcttcctatattatattagtagccagtagccacgtaccgtgataatacaaggcctagtaggataactagatcttggagtataacgctccttttaacaattatacttattttaccctttggactaggatcttattattcctaccataaaaagaaagtctcccttttattcaatggatggctactattcctccaaaggacgagaagagcgctccacagtcgccgtcaagttggaagactgcgatgctctcggtacatacgatgcccgcgtgcagtgaatatagatagtgtcttcaggcctcgcttatacaatcaggattagatagcctggaaatggtcaaaagcgtagcatattacggatagaattgatcaagacgaagagaaagcttctgagaccccagagttggacgcattcccgttggaaattgaaaatgataaaatacggtttgaagctgactccgaggctgttcataataccgagaatgataattacgataaaaatgacgatgaagagtgaggatagcgacactgataatccttttgcgtaagatgtttttgacacaaagcgataagaagtagtctagttattgtaaactcaattggtttcattgagtgtcttcggtcatgatagagactggtttaaattggttctggtacatgtatccctcgggtacctggtcatatatgaaacctctcaccctcagatttggactctgtagatacatgagtacccgatgcacttatctatggttgcgaagtctcgaatgaagatggaataaagtatgaaataggtgctgagctagtcaggccgagagcaaactccccggactctatactgttcagtccgcactagtactccaggatacacggtttgaaaatataatactgtgccgtgggatgaaagccatatgccaggcaccaaggcacttctgcaccttagataaatccagacccaagaccaaggagctcagctgcttcacgagaatagctgttgacattctaacctgggctctgactgagtcacaagctgccttgccctatttgatatgcttaagcatcgcctcggtacaaacacggaatcatagttattaaaggttggataagttgtactcactttacgattgacggggtttctggatagacaggcgttagtgcgttcaaaagctatgaaacttaccttcgcagatagagaattgccagcccttcttctcattatagcgagtataggggatacatctgagagagagagagagagagagagagagatcggttgcgtatcgttggtgtcttgaggtagcgccaaaacttccgcaggtcacatagatgactgtggatgtgtttggtttatcttagtggccaaggcttcctgctcaggtggcttctggaagatatcaaaaatatggaagctgcgtatatactaggctccataactcaattggttagagtgccatgctgatgacgagggaccaaaaatttatccgtaccctactattctactttgataattgcatagatacagagttagagccatcaagttggctttgcgtctggagtgagttatcctcgaatggtataaacttcgaatgctgactagatttgtagggcattttatccctccagcaagcttgtgccgcccaggttgctacttctaccactcttggcttggcaattgggactgtgtcgggtgccacagctctatcgtatgacccccatatcttgaaatgataatgtagtatgctgactggaactgcagcgctatggcaaatgtgcccatcagtggtgctctgctcgagaagtacgggtacctttccctgtcaatattttcaggggtatccttgctactaggtggcttgcttttgattgctgcacgtctagtacagaacagagagcttcgagctatcgtgtaatgcttggccattgggttgaatttgaaaaagtgagaggtgaagctgatagaagatgggaagatcgatcaaagtccaaagacgattgatggatactgatagaagaggatttgacggaaaatcgtgcagcatattttccactagactataacaaaaaccaatgttcctgtttaaggcttaaatgagccataactatcacattctgataagatttatcgaaaaacaaaaaacaaaaaagaatggtcccagagggggtcgaaccctcgacatctgcgttattagcacagcgctctaaccaactgagctatggaaccgaatatggaatacactcagcattttttacatctttgaggcggcgggtgcaaggacaccaaaatacaatcttgttctacattcgaaacgtcaacttcttcggacgcgaatgccagctacaacgaccactaccagtctttctttctgcatcatctgtggattagatgaatttttcgcgggggccatatcacaatttacattattatttatcatatgactctatatatagatcgttgaccacatttacattgcttgctttcttgcttgcttcatgcttgctatctggctctttctttttttggttcttttctttgtgaatagattttttgttagcttagcgaaaggtctgatgtgcaaagtttatagagtggtcagctataaccaggctgctcccacttctcttcttcctctctctatcgctgtttcttaattaaatggacataggcataccaactaatgtaattagtatgaagtgggcggctggcctaatggtaaggcgtttgatttcggctgaacttgattcaaaaggttcgacatctcaaaaaattgcaggttcgatccctgcgtcgctcatccttttttattttgttcaattcaataccttcttcaccctgcctgaaatttcagcaccgccttcattgcagaacgaagtgaagcaattaaataataacctcgtatatatgtcacatgattggttatttttattctataattgtgccaagtgcctaatatacaatatatatagttattaatacatcctacttaataatcactcaataataattttagtctttattacctactttattaatatcctatacctgtaaagggacgaagctagattagaattcaagctaactaagccgtttactattatctaaaagcttaaggaaaggaaataaagcttataggaagaatgtcaggaccctagtactaagaaggctgatgcctgagattttgcacctatcagggtatatagggaactatagactaggcaggagccatatatactacctatatagcccccttcttattatatgacctactacctatatattatccttatatactacttcttaggagaagtagctattagtttctaatatactactatatatactactatctctatttcctaatcctctattatatatagtattccctnnnnnnnnnnnnnnnnnnnnnnnnnnnnnnnnnnnnnnnnnnnnnnnnnnnnnnnnnnnnnnnnnnnnnnnnnnnnnnnnnnnnnnnnnnnnnnnnnnnnnnnnnnnnnnnnnnnnnnnnnnnnnnnnnnnnnnnnnnnnnnnnnnnnnnnnnnnnnnnnnnnnnnnnnnnnnnnnnnnnnnnnnnnnnnnnnnnnnnnnnnnnnnnnnnnnnnnnnnnnnnnnnnnnnnnnnnnnnnnnnnnnnnnnnnnnnnnnnnnnnnnnnnnnnnnnnnnnnnnnnnnnnnnnnnnnnnnnnnnnnnnnnnnnnnnnnnnnnnnnnnnnnnnnnnnnnnnnnnnnnnnnnnnnnnnnnnnnnnnnnnnnnnnnnnnnnnnnnnnnnnnnnnnnnnnnnnnnnnnnnnnnnnnnnnnnnnnnnnnnnnnnnnnnnnnnnnnnnnnnnnnnnnnnnnnnnnnnnnnnnnnnnnnnnnnnnnnnnnnnnnnnnnnnnnnnnnnnnnnnnnnnnnnnnnnnnnnnnnnnnnnnnnnnnnnnnnnnnnnnnnnnnnnnnnnnnnnnnnnnnnnnnnnnnnnnnnnnnnnnnnnnnnnnnnnnnnnnnnnnnnnnnnnnnnnnnnnnnnnnnnnnnnnnnnnnnnnnnnnnnnnnnnnnnnnnnnnnnnnnnnnnnnnnnnnnnnnnnnnnnnnnnnnnnnnnnnnnnnnnnnnnnnnnnnnnnnnnnnnnnnnnnnnnnnnnnnnnnnnnnnnnnnnnnnnnnnnnnnnnnnnnnnnnnnnnnnnnnnnnnnnnnnnnnnnnnnnnnnnnnnnnnnnnnnnnnnnnnnnnnnnnnnnnnnnnnnnnnnnnnnnnnnnnnnnnnnnnnnnnnnnnnnnnnnnnnnnnnnnnnnnnnnnnnnnnnnnnnnnnnnnnnnnnnnnnnnnnnnnnnnnnnnnnnnnnnnnnnnnnnnnnnnnnnnnnnnnnnnnnnnnnnnnnnnnnnnnnnnnnnnnnnnnnnnnnnnnnnnnnnnnnnnnnnnnnnnnnnnnnnnnnnnnnnnnnnnnnnnnnnnnnnnnnnnnnnnnnnnnnnnnnnnnnnnnnnnnnnnnnnnnnnnnnnnnnnnnnnnnnnnnnnnnnnnnnnnnnnnnnnnnnnnnnnnnnnnnnnnnnnnnnnnnnnnnnnnnnnnnnnnnnnnnnnnnnnnnnnnnnnnnnnnnnnnnnnnnnnnnnnnnnnnnnnnnnnnnnnnnnnnnnnnnnnnnnnnnnnnnnnnnnnnnnnnnnnnnnnnnnnnnnnnnnnnnnnnnnnnnnnnnnnnnnnnnnnnnnnnnnnnnnnnnnnnnnnnnnnnnnnnnnnnnnnnnnnnnnnnnnnnnnnnnnnnnnnnnnnnnnnnnnnnnnnnnnnnnnnnnnnnnnnnnnnnnnnnnnnnnnnnnnnnnnnnnnnnnnnnnnnnnnnnnnnnnnnnnnnnactattaatatattatattccctctataaagccctttatatcttacctagttaataggctgtatacctatataatatatacctttatacttattaggttatttcttctaatcctatatttaatagcctaaaacctagtctaatataggtattaaataatatagttaatagtattaatatatttaggactaaggtttagtaagaatttagctacttttctaattacttttataatatttaatcttaagatagtagttatatattatataaatctaactttagcttaatatctaacgtattttactactaagtaggctactactagtgagtgggccacctatctaaaatatgtcgattaatttaaacccttcttctttaactactaactatactactaattcgctcttaatactttagaaatttaatagagtaagagggtaggatcttactagctatctaggcttttaagaatcaagaaatttctttaatttataagatagtatactattttaaaatcccttatactaccttataatagtactttaccggtaataccttttattctaaaatatatactaataactataagttaactaaaagtaaggaagaattactttaaaaatagatactctctatagattcttataaagtagtctcttagccctcttttatataagaaatagtaaatcttcttttctattaatatagaactactctaatctctttagttaataaaaattaggttataaaatttataaaatagtaccttttcctttcctcttaattcttaaagtattataattataagtatataaaatataaagacctaaggattattagagaatagtttaatttagtttaaaaaactattctttagtatagaattaaattagataatatttataactttaataagataggttttactataggattaattataatagtaaaggttataattagatataaatactataattagtaattacttttataacctagaaattataaataagtaactataattaaatatataaataccttaggttaggtactatctttatatattatttttagaaataaaatatttattaaatcttagtttaatagccttttaaagaattagtattttaaagttaatttaaataattagatttctaataagattaggctttattagctttaaaagctctttattcctttaactttattatatataaagggaaggtattaacttttagtatttaatagctatagaagttatttaatcctaaagtttaataaaatttataagtaaaataatattatactaatttatatattactatattcctcttaccttttataactacttaatattagctattttataatattaaaataggtatatagttagttaattaaattaaaaatataggttaagattaattatattaataaacttaaattctttaaaatatacctatttatataaactaaagcttttaaattagagataattaagaataacttcttagtagttaatttaataccctttttatttaattaaatacttttaaagctaagtatttagctttaaatacctaccctccctttaagctaaagtaataaattaagttagaattttatccctaaaactctatttatagagaaagaactatattaataagctttattaattaaagctttattttatataaagtcttatagcctactaagtctattaaattatatattagattagtttataaaaggcttctatcttataatataaggtactatcttacttactaaagaaaataagaaactatatattattaataagaaataaaagtaaaagtatattagatcctagaggtagatacctactaaagaaggcctcttagtttaagaagtctctatattaattatatagtaataggaagtaactaaagggcctctctctagctctagtataccttagggatcggccattcagctatatatacagcccccttagggatatagaatatataggttactagggtatagaagagaaatatatctagatagatagattatttagttaaattaatttaatggcattttagttaagatatttatatttaaaattagtaggttaggataggtggcctacttactagtagtagcctacttagtagtaaaatatattatagatttagcttaatatagtaattctattaaatagttttaatagcttaatatttattagagaattaactttttaactaataattagattatattttaatactatacttttaatataactatcttagtataattaaagcttcttttagtctctatcttataaaatatagatattaagaaactaactaatatctaacttatataattcctagtatttttttatctattaatctaaatatattatttaattaatatattttaggtgattaataataatattattaatataaaagaaaataataatatt

SEQ ID NO: 109 - DNA, 659962 bp, Penicillium roqueforti
  misc_feature (753)..(1077): n is a, c, g, or t
  misc_feature (4516)..(4816): n is a, c, g, or t
  misc_feature (116230)..(116378): n is a, c, g, or t
  misc_feature (229247)..(229403): n is a, c, g, or t
  misc_feature (257418)..(257661): n is a, c, g, or t
  misc_feature (315587)..(315718): n is a, c, g, or t
  misc_feature (443386)..(443488): n is a, c, g, or t
  misc_feature (445361)..(445874): n is a, c, g, or t
  misc_feature (511854)..(512078): n is a, c, g, or t
  misc_feature (527075)..(527760): n is a, c, g, or t
  misc_feature (564544)..(564870): n is a, c, g, or t
  misc_feature (590027)..(590377): n is a, c, g, or t
  misc_feature (649548)..(649737): n is a, c, g, or t
ttaataagttctttagtagtaataagtctctcttagaatactacttcggctttaaggacctggattctttcttagataagttaggtagtttccacggttactttaggaggattaattagattttcctaggtctaggattctattcgttcggttctagtagttagagaagtagttcctattttattccttagtcggggctgattcttagggagttcggtatttccctaggattaccgataggttaagggagccattgtatcttaggcagttaaagaagaagaattagaattataaaggtatacattatataggtatacggcctattaaccgggtaagatataaagggctttttagagggaacacaatgtattaatgatataccaagactaattcttactaatctcggaggggcccctagggggtcctaaactataaggaaatctatctgcctatgttcatataacgaaccccttacggatcgatatcgaaacagatgtatgataatatagatattccttcccgagcctgtgcaggtttacatgtatttccctcttgtacggacctttatctgttataacaatccgctgtacttcttaagaaagaagtaagcgatttataggctaccaacgagaagcagaagcaaaagtgtactagattccggaggcagatacctgctgaagaaggcctctccgtttaggaagcttctcaattaattgctgcgccggtggaagtagctgaagcaccccccccccnnnnnnnnnnnnnnnnnnnnnnnnnnnnnnnnnnnnnnnnnnnnnnnnnnnnnnnnnnnnnnnnnnnnnnnnnnnnnnnnnnnnnnnnnnnnnnnnnnnnnnnnnnnnnnnnnnnnnnnnnnnnnnnnnnnnnnnnnnnnnnnnnnnnnnnnnnnnnnnnnnnnnnnnnnnnnnnnnnnnnnnnnnnnnnnnnnnnnnnnnnnnnnnnnnnnnnnnnnnnnnnnnnnnnnnnnnnnnnnnnnnnnnnnnnnnnnnnnnnnnnnnnnnnnnnnnnnnnnnnnnnnnnnnnnnnnnnnnnnnnnnnnnnnnnnnnnnnnnnnnnnnncactgggagtagtagggtgctagagaggagaacaccatggggtgactactgagaagagaggtggaaaggtgtctgcgttgctatccaggcctcgggagtgctttgatgtcacatagccgcttaatcatcctgctctggaaacccccactgcattacttagttaactaaaggggggtcgcactggccaaggggggcgcgatggtacaattcaataataatatcgggctgatcaaaattaactagttaagggttgtggcataagcaggtaaacttgaaagtagattcagaatatatgggacatgacagggatatgaagtattataattgcttcgcttcgctctgcaatgatggcaacgtagtgctttcagataaatttagaagaccccaagacggacgttcgctctggcaactcgaaggggccatgctgaactacctttttatggccgattgcaactatagaacctttctctgggcccatctcataaaaaggacctctctccgagcgcatctcgtataattggtggctgtggtgcaattcatttagtcggttccatttattatcggcagcttccacaagcgtcgactgatgcgctgaaggccattggtcaaatcgcccgtgggctgcactattctgatcccgattgagtgatttctccttctgtcgacggtggcgaatgcagagcccacaacaaatggcaatcatcaacaccccgcctacagtacaaccaacgatgatgccaatcttgacagctgtggagagaccattgctgctagtagttgagctgcttgtttcggtatccgtcttggtcggtttcaagttcgaatttgtaggaatcaaattccaggtgttcttccaggtgtttttccaactattggaagaccccgaaatggtggattcattgtcccctattgtcactgtattgacaataaaagagccatcaggtcctggtgcttgggccaaaaaccacttcccaccaagccaattaacgccgacaaaggctgcttggagaaaagcgcggcctagagcaggggtgctgttggtggccatgcatgggaagtattgcgtcggcgtcttcacaagcgggggctctagtgtgagatttaggagagcgaaggggaccctgatcgtgatttcttcgttattgcggctattcatactaaacgtgaatgccaaataacttggagaggtcacaattttgtcgtactgcgcgtcggacgtgttccaaaaatagaggccataatcaggttggtatatgacgggcaactcagcggctatcgcatcacatgagcttcgaggcagatatatgtatggattgactgggtccacaacaatcttgagaccggcatccagggaggaattgccctttgccaagagacctgttttgttggagtaattccaaggcgatccgccttctgccactccaatactcatatcgtacatttcgatcgggaagcttccacttgaaaacgactgagcggacacggttccaatgaccctattctgatcatagcctcccagatgaagtgagccagggattcccagagatgcggagccaatatgcattccataggaatatgatggtattttcgtggacccctcctgctcgtagaggtagctggtgatgaaggtcgcgttgattttgatcgaagccccaaatgtctgattaatatctggactcccaagagaaagggttccaacctgtaaagggtatgcttgtccaccagggtaagtctgccatccagcagatatggtaatcaagtcgacatcaggaacgtgagcaccgtcaatggttatccaatctgttcctcgtcgtgctttggcataaactggaactgcgtccgtacatccccagtccacataaccccatgttccatatggaggtagtgaaattgagttatcgtccaaggtgactgatacgtcgctgtcaaaaagacccgctttatccccatagcataccgacgagagggacttgttgtcacatatggaaggtagtaggattttactttcccaactacctcccgggtacaacgccactaccgatgaaggcacaacaagttcagagtagttgcttccgatagacaccgtgaccgcttgccaagggccatcaggtccgaactttttatcagaccaggtcatctcccggggaccagaacagaggaccttatcgaggcaaaggatccaaattgtgaaaacacattgttgtagtcctctcattcctaagggggaaatattgttagcgattattttctcccaagtatatagtaacggtgttttacaagacaggactgacttgaatcacagctgaagtgacgatgtaatttatcggtttgaacaatgcagtaagcaatgaaggccacaaagttaagcttcaagtatcagacgaagataggtcttcattcactcgtcactgccactcatagaatatcatcagacaattagggtagagttccgagttggagatttagagattttttcaaaagtcaacttgggtgaatatccggacaccgtacagtagatataatccagtaccatcccaagcgccagatataatatagatgtttctaataataagaagaattgccaaatgcgattgatagttagcgccaagatgtgatgaagtcgggcacggaccaagacaccccaccgtcgaggcgttcgcttttgccaatcagtcgttattagagattctagcgtgtctcagatcatgcatcgacagcgcttagccgcccatttatgactgctgcaatcacctgaggttgtccctggggaaatggacagctgagggggtcgttttctgtcgcatgcactttccgaccttctcataccctccctcttacatgcattttgatatggactgagaactgcaaacacatcgaggttttccttcgacatttacgtgaaattgaggaatatacctgtcaatttttccaggcgataagcgaccatgttaagtatggccacaacatctccgagagtctttcgctccatgttcatagctttgtccgctctattcggctttgtgacattattgcgactttcatacaatgcgcctctggatgattctaattcgcacttcgacggtctgtccgggaagcaagtggacgtggactggtctcgatttgcatacacccaatatgctaccgacagatcttatctgtgcaactcactcatgattttcgaggctcttcaccgccttggaagcaaagccgatcgcgtgttgatgtacccatacgatttcctcttgtctgagaacgatagtttgccggaagctcgtttacttcgcttcgcaagggacgaatatgcagtcaaactcaagccaatcaaaataatgatgaagggtgggggaggtggtaaggcatcccaacttattacaaaatgtcagaatctaggatgaatactgtcatttttcatccctgatacagttggatcacgtgactnnnnnnnnnnnnnnnnnnnnnnnnnnnnnnnnnnnnnnnnnnnnnnnnnnnnnnnnnnnnnnnnnnnnnnnnnnnnnnnnnnnnnnnnnnnnnnnnnnnnnnnnnnnnnnnnnnnnnnnnnnnnnnnnnnnnnnnnnnnnnnnnnnnnnnnnnnnnnnnnnnnnnnnnnnnnnnnnnnnnnnnnnnnnnnnnnnnnnnnnnnnnnnnnnnnnnnnnnnnnnnnnnnnnnnnnnnnnnnnnnnnnnnnnnnnnnnnnnnnnnnnnnnnnnnnnnnnnnnnnnnnnnnnnnnnnnnnnnnnnnttgttttgtttgttttgattactaagttgtccatcagattgtcatgttttaggactattgtcagttttagagagttagagaatttattaagatttttctgccacaaaatacactcgccttaccaccgtttttccgtcacaaaacttcaagctaaaagtgagcacagcaccgtggtcatcgagctacacgaaactcctcgcttttaatcaaacggaatatgatcgggttcttaacttggattccgatgcaacccttctgcaggtgcgtaggtcaatcgtggccttttctcatttcaaactaacgtgcgtgaaggctatggacgagctgttcctgcttccacctggctcggtcgctatgccacgggcctactggttaaatccaaaggatcgagtctttacgtctggactaatgctcatccaaccgtctacggttgagttcgatcgcgtaatggatgaagtttccaaggctacttctgacgtatacgacatggagattatgaacaagttatatggagatagtgcgcttgtcgtaccacaccgcccttatactcttttgactggagagttccgctccaataatcatgaagcctatctgggtaatacagacgaactgtgggatgctgagaaaatcctcaaagatgctaaatatctacatttctctgactggccagttcctaaggtatgtcataccaacttttggtaaccttcaatctctattttggatatgctgacctcttccggtagccatgggttgcagctactcgtgatgtgatcaacaaaacgcagcctccttgtgagataaatcccgcaactagtcaacaagatgactgccgtctccgggaaatctggttagggatatacaaggacttcatggccaggcgacttgtatgtcaatcctctcctaccttcaattcaatttctgatcaagcttactgaacctgaacagtgtatatgtggcactgctcttcgaacagaatcttcatgacacgtccggttctctttcaacggcattttacgattatcacaaattttcctgtccggccatgcggtacctctgtatggcttggtgttttcaatactctcgttccaacataaccatagaagaagccccctctgcatgagcgagactcgataccatgagaacatcagcaccttaactctgcatatgtggttttgctggtcagaacaaacgtctggtcatttcgactccgatcctgacaatgctacagacgggcacttggcaggctttttacatttcaatgcgcagcgcacttgttcaaagcagttcacaggcaacctgaacggaagcggagaatttcagggccgcacttggcctcgatttggataacatgtatgtaacaataagcaattgactgcaaatacctggcaatctggttttgttgtgttgatgtatctttggggcctcgatgtaagcatttatggaccagctcagtaggtacagtctcacacgtaagttatgcaagcagtaagagaagaaggagtgattctctataactaaatattaaactaaatagcgattaacaagcctgacaaactagtcatcaaggcagttgatctgtcccagcaagaattatacacatcgacaaattcacaagacaatattccctctaagaggtgtagctgcagccattggggttcgaggtctccacgatactagcggcaattcccacacagtcggagtttccagcagggttggcaatgccagcagaagcccaaatgctccaggcaccgtcaatgctgttggggcaggcaatcagatcttctcctgcgaattggaggtaaccatcctcgagggtccaaccctcgcgcacggagtttgtggggctggactgagcaccagtggtgtatccaatcttgccctggcctacatgaaagtcagttatttgccaactaagtaggattgtgagagtgatagcatacccatgccggagcgatcaacgaagatctcctggggagtggcggactcatcatacaggtacagagcaccgtcgaggatgtagaaggttgcctcctgctccttgggacgagcacaactggcaccctggttaggcagaccagcgaagatgctgctcttagcagcgttgaaggcagagttttgcacatcactgccagagtgaatagccacgacaccaaaagtcgcagactggttggacggggcggccgagacaacggcgctgacggaggcagcgatggcgaggttcttgagctgcatattggcggaggggatgcgaagattgagttgagaagatataagaatggttgaattgggaggattgatagttgatgtttctaggatatgctgaaatgcctccccttttatacttggagcgactccgtaccgtcgccaaggttgatgtctcacccattgagactatcctccaggccaagcatgatcctacagactataacgttgatattccacaatgtgacatcaacgtgacttttttatggggcaatcttgtcgatctctctcgtggttttgacagtcaagacaatgtcttatccctgagtattgtgttgacaggatacttcgtataagccatggatatcccagacccagcgtcattagagataagaagcatttcataaatcattgcgtatttgacgcatacctctttttggcctccaatatagctctgaatatgattctgaatatgaacaaactgtcaacccctaaatgacttacttagtattgcttcctccacaattcttccatgtttctccgaattatatccacatgggcatgatgtacgggcgatccgtcatgatctccgaatcaaggccaatcaaggtctaatgtcctttctggaccggtgaaacatgctctacaataataagctggactacggagtatggagtcttattcaaaccgcctggtttttgggcatttcattaatatgggtctctcaacgagtatctataaatagcggagtggctcaccgtccttatgtaggtcctcattcgctggcttccactttaggggcgatcttagactattcgtcaatcttgaagagaatctcatggcttagcatgagtattaaatgagaagagcactgtaataaatatacatatttcgcttgttgcttcacgattcctcgctgaatcatgaagatgcaccggctagaaaagcattttcatatctcgaaccaaaaccaaaaatgaggggatttttgtacaagcaccttgatcaggctcataattccatgttgagatatgctaataacgggaaaacaattgtccttactcgggagcaccgcacgaaaagacgccacgaacttctcctttggcgtacttgattatctagatgagtgagttagtaataaaatccgtgccccaaggcagaccgccagagaaaaacttacgatatcatcaatgctggaatatgttcctccagcaagtaccaccataccgatcaggaaaatcagcgcattgatgactgccagtatcaagttcttgggctctttccaactccctttccgaaggagcatgaaccacatcatggcagggaagtagaaggtgaatccggagataaaaagagcagaagaaattgaaagcaagtcgttgaaaaaaggtatcacctcggcaatgatgaatgccacaactgtggcggccgtgatcaccgccagccatgtcagccagcccatcttagtgttgatgaagcgaatgggggagttggcgaagatgcgaccatgcaccacacgcccaaataccacggtgttgatcgaaccgctaatgaagatcacagggagagcaatgccatacgcaatgcggctgagggtagttccggcagaggtaagtgcagggctggacacatcctggccaacaaaggcgtagattgtagcaccagtgatggtgtagatgacgatctcagtgatacccagcgtccagatcgacttaataaagtctcgaggagtgtgcatttcgtccataaaggagaattggcacatggcaaaactgtaggcgaaaattatgttcgtcacagcgatgaaggcttcagtaaaggagatgttatccttcggccacgcagaccatgctactccggagagtccaccgggcgagttcgtcgcctgcacacccgtcccgataattgtgattccaatggcagcgatgatggatacgaaatcaacatagcctagaattgccacctcggtgaaactaggcggaatggcgagtaggagcaggatgacggcagaaaccacggcaaagatgatcgagcaaatgccgcttttggtgatgtcgaggaatgcgatggttcccgtcagacagtgcgaggccgtgagaaagataagttgaagaccgagcatcgcattgactagctcatatgcaaagcgaccacaccctagccgatggcccagcaatcgacccgcatcagcatagttggcaacctcggggaaggccaatttgaccattccgacaatgtaactggtatagatggcgatgagaccgatgcccacacagcagatcacaccggcgaccatgccgagtgttgcaaaggtggagggaaccgacaaactaccgagtgcaatcgcctcgacgatgaggacgacagtgagtcgcttccaaccgagacgattgaacttgttgataccgtggtcatacaggttcctctcagcctcgctcatttccccgaccatgtccccctcaaacggcggtgggggagcatatgcggccttctcgccttccgtttccatcaccttgtcggtgtcatggtcgttagagatgttttcgaagcccatgatgctggtggaggtgagactagtctgccaggcagaacggaagagaggaaaccgggtatataagaagacaaattccgcgcactgtcgaatgcggcactaccaggaggcaaagcaggattgccttgacaaacgagattttgtgaactctgcttggctgctccagcacgtggagtacgacgctgatccactccagctgatcggccacccaacgagcacaccggaaacagggattggatccattacgaatggagtgaaagtggattgcattgaaattttaggcgaaacgcagcccggcagccccagtttagtgtccgttgtgcgatcagaaggttcggaaggttaggtaaaagaaatgcaacattggtgtaatcgttgggagggccacttgagagccacttgagagttaccgagggctctaacacactatggagtctctccccgcgttactccgtactgattgcggggagagaaatcagagacaaattcacagaagaaacccatcgaaaataagaatataaagatgtcgatggtctttctttaatcgcgccacagaagatcccgaaagccgacttgccaatgaaagactcggaagttgagtggccccggggtcgcctcccccaggcggggccgataagagttttgaaggtcacatgacggctgcaaacagagcaaataatttgatatcacatctacctcctgcgtacggagcacttgtcctacattatcctacttacatcctccttgcagacgatacgatgtacaaggctcagacgactaagagccaccaacgccatgcggtttagcggtcgtggagaatatcgcaaatattgacttgaacgggtctcccccagagacggctgtcatagacatcattgcgagaagtctcccagtctccaactcatccgtgggatccgactccattctaccctaacttttgtctacctcatgaccattgcttatctccattctaacatttccagacctgctggagtacacggaagctgcgagtcatgtttcccatgatgcatcttgaaacccaaaataccacacaacctcgtacgcaattattggggaatccagacatgcattgaacatccctgtcctcccgaccgcggcgatctttgcttacaacatagttgccttattcccagcagccgtgaccgccgggcactccgggtcttggcccccgaccgtggtatttgagcaatgtgctgtccaagtggaagtcgtcagacttccctatgcaggaaagaatgaagcgaacaggaagcaagccagcaggcaagcaatggtcaaacgatgtaaattcacatcatgcagatcgtgtttagaaggggtgttggtctatattgaaccttggcggatagtcgaaatacatcacttccttatgttccagttctgctatagtgaaatagaatgtccagcttacactatctcaatatgttttatcctaccgcaggatatgcgaggtatctagtagcgtaaacatggaggtctaaaagacttctcgcagtttcttcaactctccaaacggagaatgccggtaatctaggtctagggacgcactcctgggatttcgagttctatatttctcttttcttcttcgccttggaaatattgaggcagaaatgaattgaatttctcacacatacaaccgaaaattccaagatcaggacaactcaattaattgatagccactttcatttatagaatttcttcatcggcatagggctgaagtggcaaccatatccgtcagtgggttgaccgatttgtatgaagaacagattgacactaatcaagaaggatgccatgacagacttttataaccctccgagtcaatcttcataaatcccgttctgctcaaaactagactagtttcaggccagtcttcgtaagcagtgtctccaatggaacggttctaaaatggtttcctagcgcatccgtgaactgccggaagtcatcaccagtaggcaatgagtgtaaaaattccacgacgctgatgtgatggttcatttgagcccattcagcagcagtccaaccagaaggatccttggtaaagggtaaagcaccagtgaggttgaatgtacaccagagaaagcagaagcaaggccttcaatatggtcgaaagaagcaagtttccgaagaaggatctggtcagcattgcttggtccattctggaaggcgtctgaggttgccaaaggaaatgcgggttgtttgaggggtcgcgaggtttaaataatcaaaaagataccccatccatcggaacctcgtgggtgtaaccagaaagcataaaactgagcttcttatttagtatgatggatagggaatgtaaaagtggaatattgtaatcctcagagcataatcagatgatgaagctttcaggccgaagaaaatgtaccatcggagtgttactataagagtccagaatctcgaaaagatgaatacctcaccgttcaagtttgacctagcttgacattgcagattataccactgggatgggtgtgagaaagcattgatggcaaagtaaagacgccgcacttcgatacccaaccaagcgccggtcgggaaatacaaacatccggccacgtgatccaactggaggttgtacaagggcaaaactagatagatgattttacgattggactattaagtggataacctatggctatactgtccaaggcaagcagttctttatatatatcctgattctttggaatgccgacaggaatcatacttgacgtgatatcgggttccaggccgagttgcttaccggaggaaccagtatatatatctcggaagtaggccgagtcacttacagattcaatcgcaatcagaccaacaaattagtaatattgaaaactagtcgatcgggtggaggagccgagagtggactcatttagcttgttgaactgtgtacaagattggcttcgtcggttctgacatccgacattggcagttcgcacgtcaaaatagcggcaaatagcttaaatctcaatcggagatatggccgattgcccctcactttgagccgagagaggaatatctaatcggatatggatatcttataagagctataccaggactactggaagtactggattagtacatacttcgatatatatattggacaactttgagaacttcgacatcctctacaacctctacaacctctacaacctctacgatgggttctcacgctaccgtttctcctcaaccccatgtccctttatccggagtctggtgtcctgcggtcactctttttcaccgtgacaccgactcattagacctcgactctcaatccaagttttttgcctatctatccaaaaccgggctagcgggtctagtgatcctagggaccaactcagaagccttcctcctcacccgtgaagagcgagctcagctcatctcaactgcaagagccgccgttggccctgattttcccctgatggccggtgtcggtgcgcactcgactaagcagaccctcgagctcgcaaaggacgccgccgctgctggcgccaactaccttctcattcttcctcccgcatactttggaaaagctacaaacatgaacgtggtgaagcgcttcttttccgaagtagcagccaagtcacctctgccagtggtggtatacaatttcccgggggtgtgcaacggggtggatatggactctgagaccattgctgcgatcgcacgggacccgacgtctgcgcatgctagtggacggtccaatgtggttggggtcaaactgacctgtggatccgtgggaaagatcacccggctagctgcagcgtttgcgcccgaggactttgtgacctttggtggacagtcggatttcctgatcggcgggctagctgcaggaagtgcgggatgtattgctgccttcgcgaacgtttttcccaaagtgacggctcggatctatacgttgtatcagaaaggtcagattgaggaggcggtggagctccaaaagaaggcggcgatcgcagaaggtgccatcaagggtggtattgcgtcaacgaagtatgcggtagcgtgctactccgcccagttggcagggattcaggatgcagtagctaacctggcccctcgacacccttacgaggaggcgggagaggacgtcaaaaccgggatccgacaggtgatggctgaagttgctgagatcgagaagagcctgtaaggagttagacgtgtaccaatgaagatggatttagaccatgatttatttgctgtccaggtaattaatgttgagagatgtgagatgtgagatgttgagatagggggtggatattgagggtagttgcccgacagttcaggccattcatatggttatgtatctcccttttcgagtactagtggccaataatagctgtgctcgtatcggtctgcatctaaaccagacacctcatgaactaataaccccggtcctctggcccctgtactttcaaagatctagagaatcaagtccaaatcatagagtctacggagttgtgctaaatacggacgcttggcagaatggtatatttgcataaaaccgacgtgatagccctacatgcataagtatgaaggcaaataccaaatgaacctcggcttaaacgaccaaaaactcttccaatcacccaaacatcggctcagccgagcagtcgattactgatcgggccgggactaagtggagattgtcgggatattgaagatattgaagccaatcaacgggattgttctatcttttcttctttgtttaataaagatgcagcttattattccatatgaccacccccccactacagctgaaatgagcaatccctccgatatgaatggagtactacatggattacatatagtagacgggtctcgaaaaagcccgtttaccatattgtcaccattctacctcatatcacgtcctacgcagatcgcagatctcgctctagaggtaatctcttgagtctcaacaatggagctctccgagaatgctaactccctacacttgccaacctccatcccattctggcgacttgttctcagccccggtgctatcacgcaagaggttgccgaccacccttgtgccggctcagggaccgaagacgatccctatgtcgtggaatggatgcccaaggactttcgaaaccctcttcagttaaagacttccatgaaatggtttatcaccgtggtcgccgccatcgagaccttggtcgttgctctggtctcgtccgcttatactggtggtattattcaaatcgaagagcgattcggcgcaaccaccgaggttgctaccttgggagtatccctctacgtactgggctttgccttgggtcctctgatctgggccccgatgagtgaaatcttcggtcgccagcttgtcttcatcacaacctactgcggtttgaccgtcttttgtgccgcgtgtacgggcgcgcagaatatccagaccctgctggtcttccgattcttctccggtgctttcggctcctctccccttaccaactcgggcggtgttatcgccgacatgttcatggctcgcgaccgaggactggccttatcggcctttgccttagcaccattcctaggacccgttattgggcccatcgccggtggcttcctcggtatgtctaatggaggctggaggtgggtgatgggtctcttggccatcctctgtggcgtcatgtggttcttaggagccgcgttgaagcctgagacatatgcccccgttcttctccgccagcgtgcaatgactctctccaagcttaccggtcaggtgtactacagcaaattagatatcgatcaaggacgtctcacgctgaaagccgctttgaaaatttctctttcccgacccatgattcttctttttcaagaacctattgtcttgctgctgtcgatctaccttgctatcatctacggaaccctctatatgcttttcggcgccttcccgattgtgtatcagcttcatcgtgggtggaatcaaggcgtcggcgccttatcttttatcggtgtcatgattggtatgctcgctgccgttgcgtattcaattcctgaaaataagcgctacgcgaaacttctggagaagaatggtggctatgtgcccccagaagcccgccttccgccgtgtatgctggcctctattgccctccctttaggactcttctggttcgcatggactaactctccatccgtccactggcttgcaagcgtcgctgctggagttccgttcgggttcggaatgttgcttgtcttccttagtgtcttcaactacctgatcgatgcttacaccatctttgcggcatctgtcctggcagctaacacgctactgcggtcattattcggatttgcattcccactcttcaccaagtacatgtacgaagacctggggatccattgggcatcctgtgttccggctttcctggctcttgcctgcgtgcctttccctttcctactctataaatatggactgtccatccgaaagcactgcaagtactctgcgcagtctgaggcctttgttcaaaatcttgttcaggcaatccaaaaagcccaggagcctgccaatattgaacctgagatgtgcgaaaccacattggcaaatgaggaagccgaatcgctctctcacgacaaggagagccccacggatgtccactcaattcatcacactctttcacgaacttctaccaatgccacgcatgccatgcatcgggtgcccacatacgaagctaacccttacgacattgaccgcgttcatacacgagagtcgttcaaataatccaagccatccgtcatagaaggggaacatgggcgttttaaaggatctccgaggataccaaaagagaaaaggtccaggattttggacttcacgttttgtaatgttgcattgctccgtcttttttcttttttcttttttcttttttctcttattgtgttccatataccatagatcgcgttgactgctaattataattgcacttcaaggttttgtaatcttgcgttatcctgcttatacatacgaagatctgtgtagggtttatgcaccctacgttgtagagactgggccatatgcgagggcgagtcacgaatttacagcgaaatgtaaccagtccaactcattctcgtatacggagtaataatcgataaattagttctatcgtagatgcaaaacaaaacattcactttttacagtccatatacatgccaaaagaggaatttcaataccatgacggctgcgaacatggggaatacaaagcataagatcaaaccagcaagatcccaaaaaagcagaccgaaaataccaccgcaagcccaaagacgcatatttacaactcgctatgtataaaaatctcttaacggcgagaaacacagcacaagataccagacttgcccaggaaccagagggatccaataaagcggaaaatcgacagaccggcggtcgtccacagaatagcggcgaaatacttggaggtacgaagggtagaagtgttctttgaatgttagtttatgccacagcctggagttagacaagatacataccgtgagacagagacgggtgatgccttcactggtgatacacagtgcaaggatcaggttgctgaaaatccaaatcaacaccaggttggttcggaaagccttatagccatcatccatgcttggttcgtcattatcttcaggctcaacatatggctctagtgctctcttgaccgtcgattcgaactgactgtcgatatcggcctgtggcttatcgacttcttcaatgaagtttgacttggcgtcgtctttcttcgtctcagcgacggggagcgaatcgcccttgtcagaacccttggtaccccaggaaacgtcatgccagttgcagaaagcgtagaccatcaggatattgatcgaacatgtcataccggcaaagtacgcccaggaggacgtgaacatatgccagggatccatgtacaagaaacttgcgatgaagtaaataccataagtcgaaaccaaagcgatcaggacgataccggccccggacgaaccgaagaaagactttaggaagtgggaaacacctcggtccatagagaaatcaagcgtgcctccagtgaaagcattcttgacaaggtagaatgataggaccatgatgtaagtttgaacgatactgaaatacatgaacgaaagcgtgtatgcgagacgtgaactgtttcaaatgtcagtttgacatgatggggtgatttttttcagattttagcttaccctttcggtcgatttcctagcgctaggatgaactggagcatcaagaagaagatgtatccgtacttgaggaagttgttcacgattggcgtcgcttcgttaccgaacggccatcccctattcttgttggactcactaggagttccgacaagatccatgatgacagtagtagtcagccagaacgaggctagtacgagttagtatgagattcaccaaagaacacgagatccgagacataccgagagagaaccaggtcatgacaagacccatgaagttgtatgtcatttggatatgtaggaagaacagccgtaggaggttgtggccactcttataaatccttccaaaatgcatcattgcgtacaaactggcggcgaacgaaccgttcaaccaacgacgtcgctgactgataaactcggctgcaccctccggcacatcagtctcgccctttgacgccttcacgtaggttagatgccatttaaatccagcctttgccacaagctcgaaacataagatacggtcctcggcgaggaacatattctttttaaagatattcatgccctcaatacccttcttacccaactgctttgagagtgtatgatcgccgtggaagtactgctctagcgggcgacccataatagcgcgatagcggtacgcggagaaggcacccggtaacacactaacgtacccgaaggcactctctagcggtttgtcaagaatattggagatcttgtactcgaagttttgtgcggcgacgagggggttcatcaagtttttccaaccttgtcctaacattgcgtgaatctcaccgcaagatccacctaggttcttgtcattgtagaaagactcccacaatgcaaggagtgatttctttcccggtttagttccggcatcaatgagaatcacgacttcggggttaaggattcggctgaaaccgttaaagagccagcggtgggagttaatctttttactgttcttctgcttcagacagaaaatcatttgaacgggaggaaggtttgatgactcgttgccctggggccggatcaactgttggcttggtgtaactgagagttgggtggtatattcgaacttgatcttgttagtggattttcgtcggccacaaagacaccgggaaagagggtagactttgccaaggtgaatcaagactataagaactcacgatgtgtgcgacggtttcccgaccatcgacggagcgcttcatgatgccatcttggtagataccaacagtggccaataagtcgagtgtatttttgtcgcaaggatcaataccatcaaaaaccaaggagcacacaatcttttgccaggccgggccacccttattccagaattccgacttcttcaaattgacgatatctcgaatgttctgcatgacaccgtggagcgtccgcgcggtcagaactttatcttcgttgtaatatgtgatagcgatcaaaagctcagtgtgtcggttgtacatagccggtcgcagattgtatccgtttcgtagggtgaactcgtcaggatcacaggtggccgcggtatctgtgtgcgatcagctcgagtcgcatgatcaatatttgacacgaagacttacaacgcagatgcgtgaattcttccgggaagccctcctccgattcccgatactccttctgtatcgcattctggatggcgcttggaactggatagtcgacactgagcacagagccctggaccaacttgatctttcgcgtagcataacgccgcagccctgacacaggtgcctgtcggttttgccaagcttccgacggagtctcagacatgggtgattgaatacccgaacgacggctgttgagtcctcctgcggactcctggtatggaccatcggggaagatggtgactccggggtcctgtagtgtgtagcgacggagggaatcggtcgaggcatatgggtcatcgaatgaagcgttgaaagggctaggctggtttcggtaaagcaaagactgctggctgtcgaggttctcgggtttctcctcgtaaccgtacgcttgctgtggaacaaactgaattagcatccactgctgtcttggtcggtctcctctgtttgtttgttttttttttttgttccgagtcgctggtcactcacctctcgtggaccatacacgctagtctcgctggcttggggagaatgagataggtcgcctgagtgaggcgagtgaggcgatgtgctcctctgaggaaaagacattatgtgtggctcgcgttccctggatttggtggaaaggaaatacagatatggttggcggggtgatattttaaggatttaaagaaaatatgagagaagactgaactgaattccaggtacaatccggcgcctcaatagcaacagcgcaacagcgcagcaatgacctcgtaggagaagttgaaagcaaggcaggcgacctgtccagagatcgaacctgtatgagaaacaatatgggacctaggtggaaaatagcggagggttgaggttcaaagacgtgtgcgaggagaagggctccagatgccatctatccaggagatatttttggtgcagaatttgattggaggtgccaacgatgtgggctgtgaaagggcgactgaggtggaaccccagcacatcagcaattgtcgttcgccatccaccctttctgaggatccaccatggagccgtccgagacaggacatacataatgtattgggcattgccaaccgcttttcccctgccgatgcataaccattacctgcaagtaccatggtaccccaaccaccggatgattcttccccttgatcataattctctcggtatccaaggtatacttctgtacgggtatgggatttgactctctcccgagccttgttatgacaaacataactcgtcgaacatgtaacaggctgcgggtcaacgatgccatgcgtcatgacattggtcaacaggtgtctcctatgacccatcacaggccccctcaattaatatttgctgtacctatcccttctaccatccgaaacacccctgagcgatcttgcaccaatgtacggagtactcatgctcgtaagcacattggcaaggcgtctctgccaagcaatcacagcgtgacgggctgggggtggcgactcccggagatgacgacgaggcgtcatggaacgatcggctgtcttctagggggctgaattctgaatctgcaactggcttacgagggtccacatatgcagccatcgttataaatatggtatgtggggagtgaaaaatagagaaagaaaaaaagaaaaaagaaaaaaaaaagaaagccgctaccacagcaacagagagagagacatgttgggatgccgtgtgaataatgtgtgtcatgtgcccggtcacgtgctccaccatatacgcgtacacaacttattatgttcccttgcatatgcgtacactgtacaagatacatatacaaagtacactaacacgtacgacacatccgtggacccttggaagaggaatatagctgccttggtgactatcatctatttttaggtcttagaatctgaaaagttgaagtggtcaaattctctattaatacatattttcccactttgaagccataaatattgtatcaatagtttcatttttgcttggaattgatgtacttatttctcttgtgcgaaaacattgtgtctgttctgtttctctaacttacttggtgcatctattattatgttcggcctctccgccctcacccgacatcggacttcattgcgagcgcagcctccccgaggacttaagtgacggacttaggtgacgagtcttgtcccgagaggctgaggttgagttgttgaatcacttttaacctaaatgtacgggaagcttcatcatgtcccccgtaatatcagatgagttggcaccagatcgttcgaccttccaaggttaccgaggtcgttatttgataatgccgcgcaacatgcggggtaaacgatctatctacctaggtattactttacagagtacgttgcgcgcttctaaatcgtcattcgagtaaattttcaatttgatcaaaggctatttattacctcctgtgcttaacgatgtcgcctcagagaccatcgtttgatgccctacctttacgcaaagatggacctccagggaatgcttgggggatgtttggcgatgaagatcagatgggcatgctcaatctattgaccccggaaaacaccgccgcggctgctcgcgagattgttgacggcgtgcgtgtctcaacagattgggctctcaatagtatggcgaccccctgctttggacggtcttcgttcgagcatatcatcaagaacaaggctccccggatagtcaacgatgatatcttgactttcaacacccagagtagtagtcaatgggatggtttcagacattatggctcaaagcaaggaacttacttcaatgggtgtacccaggacgacatccaaaattccactctaaatggcatccacggtaattccctctgatttccaaacttcggggtttctactaaacctcccttagtctgggccgataacggcggtattgttggacggggtgttctgttagactatgcgggctgggcggcagcgaacgggaaagaagtgaattgctttgaaacccagtcaatcccggcctctgtactccaggaggtagctgctagtcagaatactacattccggccaggagatatcttatttattcgcacgggctggacccgagcgtacgaacagctgtccaaggcggaatgccagaaactggccgactatgcagcacctccagtgattggggtagaatcgtccgaggccaccctgcgctggatttgggatcttggattagccgccgtggcgggagatatgccgagctttgaagcatatccatgccagaatcaggttttctctctccatgaatggttgctagcgggatggggtgtcccgattggcgaattattcgatctcgagcagcttagcaaggagtgccgcaagagagaccgttggacctttttctttagtagcgtgccattgaaggtgtgtatagataaattctacttctgttcccaactgaccacattcatcaggttcctggtggggttgcaagccccccgaatggcgttgctatattttgaccataggttctttcgtcttttttgatcatacatatcatgcggagtacagtctaactctttgggatagcgcggaatgcaagtgggggtctttacaagttgtacggaaatatagtgaaaaatatcagaatgcaccagtcatttccagcccagacacataggtataattagacgaaacaagtcatacaggcgattgattcccttctatcgtaccatttcaccgtggggaagtcgggccggagagataagtgaaaaagcggagaatccggggctttccgtgccggtctgggttgtgtgtcattctacaacgtttcgccagtctatgttgtatgcagatctagcagatctaaacacttccaagacctagcttaaaaagaaaagagggaaatggtccttggaaatgcaggcatctcgcgccaggcagaagatcgctcaaaaaggtcgatggtagcctgtaaccgctgccgttctagaaaaactcgctgtgccggcaatccaccccacccttgtgcagcatgcgtggatgcggacaagcgttgcgtatactcagaggccgagaagcgaatcactataacggaaaggtgaagtcggtctaagatcgtcgaaaagagttaatgttgactctctttacagctactatcgccaactacaatcgcaacctcctgcatcgcgaggtaggtttcatacctacccaggtggtcatctggacgcaatctaaccacccaggatagaaggtagtcacccaacgccgtcaagtgaaccatcgatatccaaccgttactctgaggggccatcagaacgcgacgactggtggtacaaagggacggacaatttgttcttgaagcggtcgggtgaacatcgtacgcgttgagctggaagataatttatttctattatcttgctaatcttttctcagatttcgtgggtgcctcgtctactacacatctcgccaaacggctcaatcctggctccacaaaccttgcatgggatgtgcgtccactttacgatgacccttcatcattgagaagaccagtcgggggctcattgcctcaattaccacctttcgagtttgccaagcgactgttctgggtacaatacgcttacatcggtaccatcttctcccttatcaaacccttggagtttgaagaacggctggatctagtctatcacaaaccacttgacttttcacatcgtgaatcttgcctagtatactgtcaaacactgttggttatttcctttggcttgatgtatagtgtgaaccagtggattggcgaggaaggtcctcccggcttcaaatatttcaagcatgcattacgtttcttgccagatatccacgaagagggctcaattctcttcgttgaggtactatgctatgtggcatactatatgcagaatctgaataggcgggatgctgccttcctctacgtatgtattccttccattagctttccgctgtaccgctaacgacgtcagattggactttctctgcgtatggctatctccttgggtctacaccaagaggtgtctgatctttcaataagtgaatcagatcgcaaccgtcgacgtcgggcttggtggtctgtctacagcttggaccggtaatttgaccaattcccttacatttctgagaacaatacttacacggatagaattctctcggtcaagtctggtaaccccattacaattcacgatgaagacattggaataacttggcctacagctgtggtatgttgccttccatggtatgcctaggtattcgctgatttggtttttttcgatcaagggtggatcaaccgatccatggccatcgaccgttcttattcattatacacaactatcccgtatattgggacggattggggaaggtagaaattcttcttgctttttgtcgcattgccaagctgacctagatggccacatcagaaatctacagaaagaagcctgtatccggatctaacctcgttgcttctgttcagagtatcacaaatgacctctctggctggctgcgacaagtgccagatcgactccgcatcgatttcaacacactcaatacccatatcaaccgagagtctgtctcgatcaacttgcacttctactcatgtgtgaacatgactgcgcgcccgttggtcttttatgtcatccaacggcgactcgacgcggaagcctttggatccacaacagaagactggaaagaaggactggctcccaataccgttgccgtcattgacagctgtatcacggcagcgcgagcaaccactctgatcatggatgcagctgcaaaacataatctcattggtaagcgatcgcaatacaaccccatctcttctgtcatgaaaccatctgattgacgaacattctagctacatatggataccttgatggcgactatatcttctctgctgcactgctgctggttatggtgaatgctgcgtttccgcccaatgaagtaagtgcccgggcaatggagaccgcactgaaccttcttcgcggtatggcagatcggggaaatacatatttggattcgcgtcactcattgctgttggaattacgggcggccattggacctagacctgctgaagagaaggatactgatgtggcaagttctcttgctgcaggtcaaatgggccctgtgacgccaatgaccgagaatggcgtaaatccatatgttctagatccgggtgcggagttagcagcttcagaagagcttacttataactggccagagctgccagatctcccttcttttcgggatatcgccttccagttagatctaaacgatgatccagcactctgggaaggggcattggatcaaatcgacattgacatggacactgactggattgagaatactctaaagcgatgagaatgaatatatatcactcacctcttatcttatgtgctagttcttagttctgatgtagcttatacaccacatcttatcacgatctgcatccgccatgcgactccgattgttgacatatgcttgcttactttctatttgctatttgctatctgcttctttccttgttcataagtggtttgctagctaagtcagagatcgatatttgtatgtcccacttctgcatttactttctcttttttcttcatcttaattattttgaaaggtgcactcctcagacctggcacgtcacatgtgggataaattgatgcctgaggcccatgcaacttatatgaatatctccacaacttcctaactattattattatcattatgtagactacacatgtgcccgctatctgcccctccatccccaatctcaccccgcggcttatcaagctgtggaggtatcggcccgaggaagccgaaataggagtcatcggcccgacacgtgacattcatctatcatttagaggtgtgttgggatatcggcacaagctctgtgagataaatgaatatggttctctcctgaccttctttgtctgttgttatattctttccttttttagaacccactcacatcttcccaactactagtcgcaatgtctgactcagggaagatcaccatctccatcgatcgtggcggcacatttactgatgtccacgcgattcaacctggccgtcccgacattatcttgaagcttctctctgtcgatccttctcattaccaagatgccccgactgagggtatccgtcggattctagagcttgccaccggggaaccacacccccgaggccaaccattgagactcgaccgtattggttgcctccgcatgggcacaaccgttgcaaccaatgccttactcgagcgcaagggtgcccgctcagcactcttcacgacgaaagggtttcgagatttactgaaaattggcgaccaatctcgcccggccatttttgacctatcaatggctcggcccggagtactcccggagagtgtcgtcgaagtcaacgaacgtgtgctgtcgtgccatccttctgctgatagcgcttgcttctccgattgccgcttagtagaaggaatcaccggcgagaatttccgcgtggtgcaagaactagacctcgttcaggtgaaggcagagctccaacgactaaaggagcaaggaattctgtcaatctctgtggcgctactgcattcttacgcatatcctgagcacgagcgtcaaatcggcgagctcgctcaagagatgggattctcggtcactctctcttcaaaccttcaacccatgatcaagatcgtgcctcgtggcatgtcggccgctgctgatgcctatcttacacctgttatcaagacatatattgactctatctcttccagttttgaaggtgggttggagagtcaacagaaatgccgatttgagttcatgcagtcagatggtggactggttgatttccgcaaattcagcgggctgaaagcgattttgtccggccccgcagctggtgtggttggctttgcagccactagctgggatcccaccgagaagactcccgtcattggtttcgatatgggtggtactagcacagatgtctccagattcgatggccactttgagcatgtatttgcctctaaggttgcaggtgtgataatccagtcccctcaacttgatattaacactgttgctgctggcggcggctccatcctcacttggcgtaatggcttgttttatgtcgggcctgagtcagcaagtgctcatcctggtccggcatgctaccgtaagggtggccctcttacagtgacagacgccaatctgttcctaggtcgccttctgcccgagcacttcccgaagatcttcgggccgaatgagaatgaagctctagatacagagacgactgcacgccttttcaatgaactcacacagaaagtcaacattgaacgccggcagcaaggccagtcggaattttccccagaggagattgcacttggtttccttcatgtggccgatgaatctatgtcccggccaatccgtaacctcacggaggctcgtggctttgagacagcatctcatcatttggcatgcttcggaggtgctggtggccagcacgcatgctcagtggccaaaacgctcggaatatcccgcatcatcattcataagtattcttccgttctatcagcatacggccttgctctggcagaagttgtcaaggagtctcaggaacctgtttcgtcagcctacctatcttcacaatctacacttcttcaacgcctcgataacttgtcagcatcagcaaccaaagatatggaatctcaaggtttcccctccactcaagtgcgccatgagcagtacttgaacatgcgctacgaaggttctgataccagtctaatgatccggaagcccgagaactcagacttcctggaagcattccgcattcgtcatcgccgggaattcaacttcaactctgaccgacctgtccttgttgatgacgttcgagtacgaacaatcgcctcttccaaggtgcggactgagcaaagtcccttggttcaactgaaagaagccgatctgcgagatgtcgcgccggctttaaataccacttcagcctactttggccagttgggtcgggtggatacaccagtttaccttctcggtgcattggagaagaattcccgcattcatggcccggctatcattattgatcaaacccaaacaattgtcgtggctcccaacgcagtggcgaacctgctcgatacctgcattgtcatcgatctcaatgacgaaccaacctcatctggaagcgccctgtcatcggaaattgaccccatcaggcttaccatctttggacatcggttcatgtctatcgctgagcagatgggtcatacgctacagaaaacctccgtttcaactaacatcaaggagcggctagatttctcttgtgctctattctcccccgacggaggtttggttgccaatgcaccccatgttccggttcatcttggatctatgcaatttgccgtgcgttatcagcatgagaagtggctaggcaacctgaaggatggtgatgttctggtggccaatcaccccagttgtggaggcacccatctgcccgatatcacagtaagtcaccttcatattgactacatcgaatactaatatatctataggtcattacaccggtctttgaccgacctggtggctccgagatcatgttttacgtggcttcccgtggacatcacgctgacattggtggtatattacctggatcaatgcctcccaaatccaccgaactgtggcaagaaggcgccgccatcgaaggtgataagattgtcagtgatggtatcttagatgaggcacggttgatcgagttgctggtcacaaagccctcgaaatatcccggctgcgttggagcacgctgcattagcgacaacttgtctgatctgaaggcacagattgccgccaacactcgtggaatcagcttgattcaaactctgtttaacgaatatggaactcagaccgtgcaaaagtacatgtacgccatccaggcaaccgccgaggctgcggtgcgcaatcttctcaaggaactatatcagaagttcaatggccagccattggagtcagtcgactacatggatgacggtacccccatccgattgaaggtcaccatcaacggtgccgagggatcagccatcttcgacttcgagggtacaggccctgaggtttatggtagctggaacgctcctattgccattactcactcggctattatctactgtttacggtgtatgatcaatgcagacgtgccactgaaccagggatgcttggcgccaattgacattcgtgttccatcgtccagcattttgtcaccgagcaagactgctgccgttgttggtggcaacgttgtgacctcacagcgcattactgacgtcgtgttcaaagccttccaggcttgtgccgcgtctcaaggctgctgtaacaacctgaccttcggtagagacgccaagctcgattcgtccaccggtgctgtcatcacacctggatttggatattacgagactatcgcgggtggcagtggtgctggcccaacttggaggggtgagtctggtatacaagttcatatgaccaacacgcggatcaccgatcctgaaatcctggaaaagcgctatccgacgatgctccgtcagttcgctctacgtgagggctctggcggccagggtaggaaccccggtggcgagggagtgattcgcgacatcgagttcctttcaccaatccaatgttcgattctgtctgagcgccgtgtccatcggccttacggactggaaggtggccaggatgcacagaccgggttcaatctgtggatcacgcgggatccagatactggcaatgagcgccgtattaacattggcggcaagaacaccgtctcaatgaagacacacgaccgggttgtgatcaacactccgggtggtggtggctggggggctgtatgaataagttgtatagcgagcatgatatttctagtataccaatctcaattaaatacagttagagatacaatggtgcttttttggcctcatgaataaaatcacaaaatttccttttcacaacttagactttccaaatactggtcgccacatttcattcattagtcggctggtgtttaccatgtctggtcgcaattggtcgagggaagagactccaagcatcttcatggtgatttcaagttcttcggcgatgactgccaatgtgttagcttggaattgatttgaataccggtcccaacttactatctgtacatctttccactccttcggcgccgtatgccgcgagggcatagtagtaaggccggcccactccaacggcggtcgctccaagacacaacgccttgagaacatctgctccgtcgcgaagacctccatcaacaaacacctggagcttgtcgaaagcctccgggtagtatgtgcgaatctccaggagcgtcatcaatgagcttggggcggaatgaatctgcctgcctccatggttgctcaacagaattccctgcacaccatattggacggccagcttcacgtcctctacactttgaacccccttaagaaccagtggcccaccccactctgacgaaatccagtccaaatcttcccaagtaagaccaccatcgaccgagccgggaacctggcgacccccaaatgctggcgcaaattcgttctcaccgtgagtgtctcgtgcattttcggtcaaaccagcgtcgatattttcttgtgcttggaggtagcgatcggcagtacgctttcccagggttgaagtgtccaccgtgacccacaagctttggtatccggctgccttgactctttgaatgagtgacttggcttttgtccgatccacaggcacatagagctggaatgacaagttcgaagggctttggttgccaagtagccgttgctcgtccagatgagcatccatgatctcctcgagcggcttcgtagatgctgtactgatcatggtgtgcagtcctttgcgggtagctcctctcaccagcaagggttcagcgccagggtgtgagctgcccagtgtacccatagctgatacgaagaagggaaactgggaggtatgtcccaagatgttccttcgggtgtccattgaatcaacacttctcaagatccgagggcgaaagttgatcagagaccagtcatccagattggttctcattgacaggcccgtattagctgagcttgatgcgtaaacccatgacttctccgacaggacattctttgcgaccttctcaaagtctgtcgtggtgacacatagagaagaatcgggaattttgttgattgccatcttttttatcgtagtagcttaggatatgaagcaaaaaaaaaaaagaaaaggagcatggaacatggaacatggaggctaataaagtatagaagatctgataacgggcccgaagtcggccccgatcggctactcattccggctcggctatgtccatttggggtaagatcaattgccgaattgttatagctcttgaatatttacggagtaaatgtagacatatacacattctcccctgagtttccggatagtcatctctttttgtctatttttctatatcggaaatgaggtcccgtatttatcgaggaacgactaccacgaaatatgtttccatatgggattatattctcaaaatggttggacaatgagcatattcatacgtcaacattctcttctgcgcatttaatgagggacatagagtcgtagccgccatttttattgatgtagatgcgaacatggccattttagaggaaattagtaactaattgaagagtcacaaaccgcagatttattgcaggatctggtcccacatcatctatccctggcttttcagatttttgcgataatgtctccagctcgtaaacataaaacaaatcgacagcacgagacccaatgacgccagtccaattcccatgtacagcgcaccgcggtaaccccgtagtacattgcgccctccatcattgacatgcgtttctaccgtgcctgcaaatcctaggccaagggagatagaatagttgaccgttgtagcaacgagggaagcggccagtccttggtggtgccgaggcatggcgttgctcaatatcagggttccagagggaaaagacatgtccctaaaggcgaatgattaatgacgctgaataggaccaaatctaatgacgcaagaataagaagacttacattccccaggaggttatcaagctcaccacaaatgcctgcgcccagtaaatttgatcgacaggtacagtggcgaagatagagaggcctgcggtgaaaaatgccattgcgcaaaacatgatgacgctgggtggcaggcgaccaagtaggaaaccagtgatcaaagctgccacggcaccagaaatagcggccgctgaccatttggccgtggccaacagtggagaatcacctttgatgacttccatgaattgatagaagtagtagatgataattccaaaactcgaccagccggctgcgatacacccaagtacccacgccagctcagtagtaaagactgaccgcgggagcaatggacatagtgccttgcgttcgattaatgtaaaggcgccgaggcaaataaaaccaactatgaggagaacataggtgtaagggttcttccagcccacgagcggggcttgattccaagcaaagttgatcagcaccaggcctgaaattcctgcagtggcaccaggtagatcaagacgttgccacaaacgaaggttgtcgtcgaatttggcttggggggtgtgggggatgacaagccatcctatcaaggccatcattgcacacgcgattcccatcacccagtatccccagggccaccaaacaagctgagcaaagatagaagagaaaacacctcccacgataaaccctccaggcgctgtagccccaaacgcactgaatatcatttccttgcgtaggcccggccgatatgttcttccaagaattgcaattgcattaggaagtaacatagcgggaccaatcccctgaagggcacggcagcaatcgaagaatatctgattcgaccagacactgaacccagccaacagtgaccagatactgaaccaacagaaaccgatcacaaacatgtttcggtgaccaaagacatcgcctagtctaccagcaacaagaatgaaagtgccaaccgttaagctgtaggcggctgcgaaccagcttaaatcggcaggatttgtggtgccgaagctatcgccgatgatatggactggagcaatggagatactaagaccagcttgagtcatgaattgtgccatacacaccacactgacgaagatggtttcttgaaaaactgatttaggcggttccatttgagactgagacgtttccagtcgggtcaaagtttcgtcaacatcattttgtgtgggcaccttgtttagattgatatcgttctcctccgagtccgacattgaccgagtgcgatgattaagctccatagcgaaagtcaaatacgcaccaaagaagaagctgaataaagatagagacaaaaataagagacacaatcgaaagaaaccaagctggctttgtatctgatccaccaaagtggaatgccgacttcaacatcttcccgtcgggcccgatccgacggaattggagatgtcactccgaatctgtcaacttctgttatgacagactcattgatcgtagggcctaatctgtgtaaactggaggctaatggtatatgcagcttcctattaataggaccaacaattagattcaagctgaaaaagcattgatctatacaggtacctacatagatgatgtagacatgtataggtgctgaaaagaagtacacaaagaactcctttagcattttgatcgaaagcattgccaaatctcaacttgaaatgtaattgaatatagtcccttgtaagctctgaatatgttaaatggtatacatctataggtggatgttatggctatacagtggatgctccaggctggatgagggggtgcttagtaagtatcacatgcatggagctgccccaggcggccctggttctttcaactttcgctttcgctttgttcgctttcttcgcttctcttttgcatcttctcattgcaagtctcaatatgtctgtcacgatacccggttgatcagccatagggcttcttctctaatatttattcccttctatctccattgctgcatctctgcaaaccacccaagaccgcgttatcgcatcttccccgcgaacaaaaaaaaaaaaaaaaccaaaagacaaaaaaaagtgacgtggagtccaaggacacggtattgacctccatgccaaaatcaccacctattgtgtttattgccaggtgaatatttactccgattgcactgcttccgctactcactagcattttagacatggtgcccgcctcgatgctgcagataaagattggcacttaacctctccaagccctttcgatccgcccctttcctacggtggatggatacagtctcgggcacttggtgtacgtataggaagtctgctaagggcccgacagttcaccggggaagatccagagagtcagcgcagccatcacccgacctcggataaacaggcaaaacccacccccgcatcttcggacctgtcccatcgatataacgtcattgtccatacctctccttaccttcggtgtctgcaaactgcaataggggttagtgctggtattcgccaagcctcggacacagaagcatccgaaacaactagttcagctcctactgcccccacggtttcatcaatccctgaccagcgatgcctgcttcgcgtcgacgcatttctgggcgagtggctatcaccggattattatgaccagatcacgcccccgccgggctcggacagaatggtggcgtctgccaaaggggaattacttcgtcgtgccgaggtcatcccagccaccgctggtttgacaagggcgttgtcgggccatttccctggcggttggcgcagccagtctcatcctacctcgccggatgatgaagaccgtcgtttgcattccgcaacatcccagcgtcagcgttccaccacccatgacactccccagaaccctacccatcacaagcatgcaaagaagtctctcagtcggctagaaacggacctgccgcctactgtagacgcatattacgtgcccccaactcctagctatgccatttccgcgtcggaccccattcctacaggctatgttgctcatgcacgaaacgcatgtacgaggatcgactaccagtgggacagtatgcgcacgccttattggggcacagggggcgagttcggcgaggaatggagtaccatgcatgaacgagtgcatgatggatttcagcacatgattaactggtaccgggaacaggatctacctgaacacggttctacagcggagtcaagcaaggtaaacgacggtaatatacaaacggtcctcgttattatcacacatggcgcggattgcaacgctttgatcagttcgttgaatgggcactcggtcttactcgatattaacacagcttcactcactatggctgtgcgacgcaaccgtgtcaataaacccgcgcatgacatggatcacacgcctaaatccccagaccctgagaaccaatcggtgtcactggaatactccttgcagcttgtggcgtcgaccgatcatctgcgcccgggaatgaacccctcacagctcacctcgctgccatctccctctgtccctgtactttcaccgcctccggtccctgcctatcggaatcgtcttggctctcgttcatcgctcctccaagaaacatcaacaaatggaccacctaatactagccctcggacatggaccctggcgatgcgcccggcaactagttcaagtacttctcaaggtgcctctgggctgtggaactcgatctcgtcgcctaaagcagatgcagaggacaaccttgtgccgaacttcggtgatcgaccggtcagtcaagattccgccctctctgataggtatgacaggtctgcggatcttggctggacgaagcagttaccacagcggacggtgtcgcagcgtggtttatgggggagtgctcagccattggatcgtgaatgcggatcgaagcggcgatggacggtggcagaacagtagctgtggaatgattgtttttattggattttaggatacctcttgcatggcgttgtggtctacttctaatttttttggcttttcgatattcaaaatattcccatgacgacaccccaaccctcaggcatctaccaggcatctaccaggcaccggtaccgtggcttcccctcacgtctgtctctccgtctctccgctctttgctctcctctctcctctcttcctttcaagtatctcctcccaactttcccataacatcgagactttcatgtcaagcatcggaacagacggtctttccgtcacttattcctctgaccgaactgggtctccggatctacgcttgatccactataatgatgtctaccacgtcgagtatgcttgtctctccatccctttctccccctagcttcataaacttcaatttgggatgatattaaattatctcgtatagatctggctctgcagagcctgtcggtggggtgtctcggttccaatcccttgtaaatcactaccgttatcacccacagttcgccgggcagcccgatatcctgaccttcttctccggcgatgctttcaacccgagtatcgaaagtacaatcacaaagggcagacatatggtaccgttcctcaacgctgtgggcaccgatgtagcgtgtgtgggtgtgagtatggcaaccagctgcccgtcaggcctacatacaccgctaatctgagcacccacctagaaccatgatctcgattttggagtcgcccaattccgccatttggccagccaatgtcactttccttggctattagcgaacgttcttgacccagcactaggggcggataccccaatagccgactgcggaaagtctcggatgttgacatccaatgggctcaagatcggtgtgttgggtcttggagaaagagaatggtatgcgctcctagaatgtatcttcggatgctttcattcctttgcttactcgggtctaccttaggctcggcacaataaactctcttccgcctgatctgatctacaaatccgcatcccaaacagctcgagtgcttgcgaaacagctccgagatgaaggagcagatctcgtcatcgctgtcacccaccaacgtgaaccgaacgactacaaactggctaacaacctgtcacctgatcttgtggacatcattctcggaggccatgatcatttttacgcccatgctgttgtcaatggaatccatgtgatgcggtcagggaccgacttcaaacagttgagttacattgaggctttccgcaaaccggacggcttgcctggttgggatttcaatattgtacggcgagatgttgttcgctcaattcccgaagatcctgatatggtggcgatggtgacccgcctaacttccagcctcagggctaaactagaaaagccaatcggatttacggtcagcccgctcgatggccggttttctactgtgcggcagcgtgaatctaatttgggaaattttgtatgtgacctgatgcgcttctactatgcggctgattgtgccatgatggcgggcgggacaattcgcggcgatcaaatctatccgccaggaatactgaagctgaaggatctactgaactgcttccctttcgaagaccccgtggtgttgttgcgcgttccaggccatgcactgctagctgcactcgagaatggggttagccagcttcctgcactcgaggggcgattctcgcaagtatccaatatcaagtacgggtttaaactggatgcaccgtcggggtcacgaattacattcgcccgtgttggcggcgagcctattgacttacaacgtgactatcttctcgccacacgcgggtatatggcccgaggaaaagacgggttcacgtcattgcttatccaatccgaaggaggtgatgtggaagagcttgtgtctgaggaaaatggcgtgctcatcagtacaatcctacggcaatatttcctaagtcttaaagtcctcggaaaatggaaccgctggagcgccagcttaggtcggcactggagtattgtgcatcgtaacctgcatggtgagggctggctgaagccagcatctcctaaaaaagagaagaaagcatgcgacctgctgaacccgcggcctgcactccggcggacagcccggtcagcatactactatggtcgatttcccgaagaagtcgaacagggcaccaacgttatcgccggggacgagacgaatggtaatgccatggactccgactcagacgaggatccagagattctcacatcctcgcgaccaaccacaaattacgtcactcaaccagcgaaatcatccgctgaagaggagtatcttctacaaattgcgcggcgagttgtccgaaaatggatgcggcacgcaggtctgcagtgcaggacgttgaatactatggacggcgaaggggaattcactccggcctggacgtcgggaatctctcctcgactagagggacgcattgtggtagagtagacatgctcctccacttccattccgtctttctcggattttctggtttctcttttgggtttccttttgttttcggggattttcttgtcttcatcatatttgctgttctctattgcatcatgcatatgcgctggatggcctggcgtttccggctggacggaatgcatcgataccctgaatgttttcgatatattctattcagtcggtcttcttcttgggaacctcctttcgtaacaagtagtctcctcccctccaagccttgtaaactccgtaaagaccacaaaatggccagacgtcccacagagcacgtttgaccgatcctttccacccactctcgaactccccccgatgtggaccagggagatcagattcatgcactcggaccttttcatacaaagacggaaggtgctgtgcatggtatttttcccgcagagaatcataaccgggcttgttatagatggaccagaactcgtcctctgtatagtaagtatgtgcatatagccatttctttcctccaagactgtggaccttatgttctagccgtcgattttgagccacaaaaccgacctcatccgtggtggcggcaggcccccagattccaaaattgaggagtcgtgtcctctgtgcatcgactcctttgtcgtcatctgccggctttccttccaaaccaccggcacttcctggtggtagcggacagagccaaagcggatattggccaaagttttcagggcggtccagccagtccaggaactcggcagcagtggatgttggtacaccgacgtcttggataatatatcgacgcgcaagcccgctgacgtgtagggcgtgatacatcaccttggtgtgcatgaatcggttgaggagccagcgtgtaagaaaggtgaatggaacacagaagtagctaaaagcataacgcgcaacccagaaaccacctctatcatagcggaaaaggtagtcagtgagaggaatgtagtccactgcatctggcatgtgaggagaattctctcggtcggagatcttggattgagcaatctgttcaacgtgcaaatagaaccaatcgtcttgtcgccgagtaaagcgccgaggctttacattagaagtctgttcaacttgtcttccagcacaaacgacgatcttgtcccttgcatagacgattccgtccagatattcagtgcttggatcagcactagcctcttcaaaggcacgcaccgcgtcctccatattggaattgacatagtatttcagttccaccagtggcagtgaatttttcaatcgaatttccaacaaggtgaccactcctaaggtcccgaaggaagatgcggcgccccagaacaagtccgagcgtcgatccgccagttccgatcccatctcgacgcggtcattgtatgccttcaccacctgaccatctgccaggaccatttcaatccaattgactgtatgatcgaagaatccctcgcggaaagaactactctccccggatgtccccgagaacccgccgccaaccgagatgttggggaattcgacaacaactaaagggaccaaatcatgggccttggtggcagccactagagcatccatagagacattgggctcgactgtagctgtacgtcgagcgacatcgatctcgaggacgcgggtgagaggttctgtgctgaccgtgttggagagagatcggttggagggccgagtactgttggtagcaccatgatatatacgaaatggttgctggcgactgtggaagtccgctacccgtgctgagatttcttgtacagcggcagtatgatccatgataaataataatcaaaaagaagacaagggaaagatgagaatggaatgagaatggaatgaggagaatgcccgaggtctccgcatttagagccggacgagtgagtgtgagatgactacatttactattcatatgtttgtacgaaatcaaattcagaactaaaatatcggtatcatcaacataaaaagaaaggaaaatagaaacaaaatagaaaaaccgagcttattggacgccgactgggcgtgctccagcgagattgaccaccctaccccctccagctgctccaactactgtaggtgctcgaggctgtacccaaccgggaacactggaatcatgactctcacgtccagagatggtctgccagacgttggggaatcctgtgggcaagatgcctttgattctggcaccaggaacggcaaatcgaggctcacgatggagaaggtagccgcccatcagcccttgtgtaatcaacgatgcgaaaatcgattcgatctcttgcatcatggatacatctgcctctgtcctgtcgtcggggtcatacgcatatggatccagttcgtactcgccataattctcttccgggtctccgtcgatcagttgacccggaggattgggctgtgatcgcccttcttcggtgtaaaatccatccggagctaaaaaatcaccatatttttctagtatctcttgatcagtggcggggctggcccttccatctgccccttctaggcgagcgtagtcgagatcagtaggttcggaaacgacttgtgatccataaaagttggaggacgccatagcatttgccgggccatttccggatgctgcgtgctgcgcttggagccatcgtgtcgccacaacgagctttttaagattgaggattggtggaggtcccttgtgcgcctgcgcctgcggacctccgtacgaacctccatacatgaaaaccttgcgtgcaaaagatcgccatacaagaatctcgcatcgatttcggagggtaaacagaattcccttatgtgcaaaccactgagcagtcggggagccaaagaagagatgttgtcggaaagccaggtaatctcctcggacaatcaatcgacacagtggctggaagtgttccgctaatccttgtgcttctggtcgtcgaaggagtgcctgagatggaaatcgtcccaagataatgttgcacggaatgaggtatgagaggattaagtgtcgttggcttatggcctggcggtggcattggtcataggcggcctgcaaagcgatgcgggcgggaaagaagaggttgttggcgaaaaggtagcgcccgagataatagaggtaggtgacacgctgtgaggctgggaagtaggccaaggggggtgattgggcgctgatgcttgcaaacatttgctcggcgttgcgtagtttgccgcactgtgttccgtcagcatcaagattcgaagggaaggtgagatattcaaggataggcctccgtacctggaagagcaatttgaggcagagattagccatgaggtagataccgatgcgcttgccctccggcttaccagtagggccgggagtgccggtgcgatcggtgaggcacttaatgaacgcttcgcgcaccacgttggccgatttttccaccaaagttaccttctcgatgctctcgtcgtgagccgccagaccctccattcgtcgaatatgcgcgatcaggtccggtcgacgatcaaggcccattgccaattttgccagcactttggacaagtagagaaccgtaggaagaacgacgacacccatttgactatctccgagtgcgagcacgcattgactgcagttaacgatacggtcgagtcagctttcaagcccaaagacatgagtagaatcctcgaccggggacagagtgcgttcagaattcttcgcgagggcagcaaaacttacttgagcagcgccttcaattggttgtatgtttccaataggttatctgtgttcatatcgcgtaggaatatcaggtagagcttgacgaaagtcgggaacgccgtccatgagctacttttggatcgcggtacgagaggctcgcatcgtcgaagaagttcggcgtcacttttggggcccgggccataattctgtcgtagttcactgatcatgcgctggtaaatgtccgagagtggcggctcgagctgaagaaagtcctggactttggcgccatcgcgtttctggaccaattcctgcaaactgccgaggaattggtcgaggacaggtgtttgactcatgttgaaagcgcgagatactcggttaactggtagagtcgcaccagaagaattaatttgattgaacgatcattgtgtcgtttggcattctcaacgttcaaagaaacccaactggcgggtcacagagtcaagaggctcgtctgttgacggcattgatggcagaacccgtgaccgccctttgtatacaagtgtccaacgaggggagttgattcaatttcaattctattcaatttcgtgaagacattgggtgctttagtggggattcaatcaatatataatttatgatagcagttctgatttggttcaaatggattggtgccacttcactcggattgtctttctaccatctatctatgctccgtataatatgcaacataggatggatatattattatttccatagaagtcatggataataggtaagattttcacctacttgaaacacagtgatatcccagaaaactagacttctttgtcagtcagtagtatagtccccatacaaagccgggcaagatacatacaccaatatcacatgggacttccttacgtggagactattatggagaatatctacttctagcatagcatagcatagcatgacatagcatagcataagttatctaagtatagtctacctccagggctcgatactccatacgtgcggccaaaccaggatccttcctatgatgtcatataacttggactaacgatcacatgtgaaggagagcataacgtcacagagctgggaatgggaagtacaaatatttcgattcttcttgtccttcccaattgatcctaatttccattcacgcaagaagtatgggttctgagtcttttctctcggcgctctcggcctttatccggcatccattcgtagagacctttacctggctctacatggttatacaagccgtgttggtttacatattttctcctatacccccgccccctgcagctttgaatccaaatcttcctcgaaagagagtcgcggtcattggtgcaggcctaaccggtgtgtcttcggctgcccactgtgttggcaatggcttcgatgttcaattgtttgaatccagacccaaagaacaaggattgggaggcatctggagtgtgagttttcttgatttctatttattcctagttaaaatacctgctaatacttttacagagagtcaattccacctctgcattacaggtccacagcgtcatgtaccgtttccatccctcggtccagttcgacagcgcatatcccacccagcaacagatcaaacagcaaatcgttgatgtttggaagagatatgatctggaaagacgtactgccttcgagactaaagtcacgtccgtgaaaaagaccgagaatggccagtggatcatcaacgatgacgaagagcagtatggccgcttcgacggcatcttggccacggtaggcgtttgtggagatcctaaaatgccaccgctacccggccaagaaaagttcaagggccaaatctaccactcctccgagttggatggcacaaatgccaaaggcaaaaaggtgctcattgtgggaggcggtgctagcgccattgaggccttggagttcgccgtcaaaaatgaggctgccgagattgatgtcctttctcggtccgataaatggattattcctcgcaacatactggtgcagtctctccttgcatgcaacatcttcggtcaggaaacatcactttcgtggattcctgaatggttgctgcgcaagtttttctatcgtgatcttcaagacattgcgccgacagacaagggaatatttaccgggactccgatggccaacgacgagttgtttaaccagatccgcgagggcaaagcccactggttacgaggtgacatcgtttctgtggaagagaacggtgtggtgttcaattatcgatctaaaggcgtcccaaagggaggacctggccatgaacaactggtcgagggagatatcatcgtcatggcaactggtttcaaacggccttcattaacctttttgcccaatgagtgtttcgatgaaccctacggaccgcctaattggtatcttcaagttttcccacccaagtacccggatatttgcgcaaacaatagtacctacgtcgatgcgattggtacagtgggcaatatgcatattggaatctacacgcgattccttctcatgttcctaaccgacccattgaccagacccactgaaatgtggatgaagacctggattgacttcacaaggttcatgaagcgtctggcgcccacgggagcatttgacttctttacctatgctgaactaatctactggtacttcttcgtccttgtcgttaacccgttccgttggaagtgggcgttgttcgtgttctttggtattggccgtggcttgcctatgaggtttgtggagcaagagaactcgttccgcagggagctgaagaaacagcccgaatcaaagaaagctgattgaattgggttgctatgatattcactcagtgtcatgatgaggatacatgtgcattgaaagctgggaaggtcatggcttgaatggaaatttggctggttggttcggcttggaagacaattgcataagacacatgtattgtatgtaaaataaaagcactaagaccgcaaagtacgcctgggccgtgtcctctccttcttcggctagcttagccagaagtctgttggtgtgttcccgcgctttgtccgacagcttgtcgatcttttcttatatattcatctgaacgtcaggatcgggtttccagttagttaggtgtgcaacttttactacataggggtatacggtaaaataggcgagaaacgcaaggacagacatagcgctcacgttcaacaatatccacctgaagatagaaaatcaactccatcattgccctttaatttctggaatcttcttctccatattgtaagcccaatttccccctcgcaaaaagcgatcggggatataacgcttctcctctagccagagtataggccatagcaaagtcacacccaggagacagaaaaggcttgcaatgagatgccaaccaaaaataatccaatacccgatatgcggcatgataaacttgacaaactccgatgtttgatatagatcttcttgcttggaaatgtagtaaagcttgtggtcgccattggtcgtagcatcgcttttgaccgaatcgtacgtcaggtccaagaccgtagtgagagtcaccggagcgacatggaagggaacaagccagatggtgaagatctgtgacatattcacatagagtttgagtttatcttcatcaaaagctaaagaattatcagagtctgaagtcaaaattatgaagtccacaaccttagaagtttcctgttgacataccaatagaatggatctctagctcgatccggggtgacatgatcttataccattgaaatatctttgaaacccaccatctgctaccttcaaagctgggcacacggcagaatggatgagtaaaggatacattgttggtaaaataccggtgaaggacggtttcttgaaaagatggcggcgactgtgttagaccccggataacggtaggtatatcagccactgaaggaattagctgatgaatccaaaatatcagatcgataacgcacctgggttctccattttggtcaaaacgttcaaaggcgttgttggaaaagaaagaaagagaagatataaagaggtagttaactagcttcgggtgatacggtgacgtcatgttcgactatccaggtcggggtttaacacgtgaatctcgtcggagtcacaccggttggaagctacgccaatcaaatgagttgcttttaattacgtgacctcttctttcgatcgatgtgacataattcatagagctcataactatcaaaaattgtatttctgccagccctagaagggtacaccagatgccggttttctatcggcatgccgagtcattatattccggcggtgagacgtagaatataaacttccacccgtggacagctgtagacagtagaccgagttgatccggtgagatcataccattcgatatatgtcgtagaagtagatacatatatgcattggtcaagatggaccttgggtaatcaagaaaactccaaagtgattgagttccagaaagaaacgcctttgcacatgggaattgccccctgcaaccattttttaccgcttccagctgtcaaccttctttcgtcgcttgtcgaaaacctggcccatgccgacaccatcaccgcgttgcccgtcctcgttgcggactcgcttccgactcttctcgagtgcggctccgttgcttttggatctccgggtaagacgttcgatgttatccgcgccttcattaagccccttccattcatcaccaccgtacgtggtgtcctttccgcgacctcgtttcgccaattccttctttgtctccttcggcaatcggacaaagttggtctcttcgtaggtggtacgctctgcctcgcgctctcggtccttctttgacttgaccgttcggccaccatcaatgattgtgctgccgatactgggctcagccatgggtgcggacgacatttcagcgctgacaaattcgtcgatgacgttcgatctaatgggtctgcggtcctggcgttcgcgacgctctgtcgtaggcaaggaagttggcatgattctcgggggacgataaatgccgtctccgggactctcgacagcacccttggagggacgggccttcttctgctcggccactcccttggagaaggcagagacattgggccggtacgccatttcatcgatgtcctcctcattctcgctaccgtttacatcttcgtcttcatccgatgatgcttcgctgcctgatgtcgcagctttgcggcttttcttggtcttggtcggctgagccttctctgtccgctccgcatcctctgcagctttgatgaccttgtctatctggtacttcaatcgtccttccaaaggacggacaccacgctcgaggaatacccgaagctcaatcaatttcttgcgaatatcatcttcgagggagttgtctgtagattggctcttctcttttggggtttctttcgctgacacatttcgcagttggaagataatcagaaatacgagattttgcaagtaggaaagaaggatttcgctcttggtgtcgaggagagaaatgccgtctttgggaggctcgatcgtgacatcggagggcgcatccttgtgtggcttgggtagagaggaggcagttgtcgacagacaattattcagagtctctagcaatgtcggtagactttgagggcgcgcagacgcctgtgttggagccatgattgaaagttgatggcttatagagaacaataattcgcgaaacaaaaaaaatttggccgcttcgacgataacgccagtcacgtgtgataaagacaaggcaccaaggcactcttcgatgatcgatcgtcattgccagtctgtcactcgcagttcgcattttatctcccttcgagtatcgcgagtttctcacggatgagaacgtgattttctctttctatggtagatgcttgttgtaaacaaccattttttctttcacaatcacccattgacacactagctctactcctttcctctccgaaacaagccattgaggttggtttctaggctttcaaaagtctatagaaacacccaacatgcggttcgccgatcgagcctttcttctctcgtcgaccctactagcaatcccttctttgactacggccttttatctgccgggtgttgcgccgacctcctacgacgaaggacaagcagttccgctttatgtcaaccacctcacccccagcctctctcgcgatgaccagcttcattcggtcttctcatatgactactatcatccggcttttggattctgccgaccagcagatggtcctaaagatgtgagggaatccctggggagcattctattcggtgaccgcattcgcacctcgccattcgagcttcacatggcaaagaatgagacctgcaaatcgatatgtgcagaggccaaattcgacgcccgcagcgcaaagtggaccaatcgacgaatagctcagggctacaacattaactggattgtggatgggctgccagccgcgcagttgaactatgacggcgttaccaagaccaaattttataaccctggcttctctctgggtgagctagatgacaatgggcaggctctgctcaacaatcactatgacattgtgattgattaccataaggtgggctttggcggcaaggataaatatcgcgtggttggagtgcttgtccagcctgagtctcgcaaggactcccggaatttagaaggcggggccgctgaatgtggtaccccgggcaatgttctcgcgctcaatgaggacggcgagaccacagtcacctggacgtatagtgtgtactggaaggagtcccccacagcctgggctacccggtgggataagtatcttcatgtctatgaccctaaaatccactggttctctctcatcaactcggctgtctttgtggttttcctcgtgggtatggtcagcatgattctagtccgcgcgctcaagaaggatattgctcgctataacaggctggattcgttcaacctggaggatttggatagcacttcggctgcgatcgaagatggagtccaggaggattctggctggaagttggtccatggcgatgtcttccggtgccccgaatctccgttgctgctgagtgtgatggttggcaacggcgcccagctatttatgatgactggtgtgactgtcggtgagtagtctgactcccgctcttcttctctttgtactgatttttatttgtagcatttgccctgcttggtctcctctctccttccaaccgcggattcctggctactgccattctcctaatttccgcccttttcggtgggatcggtggttatgtgtcggcgcgagtgtacaagacatttggtggcgattcttggaggcgcaacattatcatgacacctctatttatacctggcattatattcggtactttcttcatcctgaatctctttgtttgggccaagggatctagcggtgccgtaccatttggaactatgttggcactggtattgatttggtttgttatcagcgtgccattgagcgtggcaggcagttggttgggctttaagcaatcggtactatcaaattccaatcccgttatccagacattccgatgactaacttcatttcccaatagccgcttgagggtcctaccaagacgaaccaaattcctcgacaggttcctccgatggctggtagcctgcgcacaattccatcgattctgctgaccggaattctcccctttggtgcgattttcgtcgagttgtactttataatgacctccctctggaccaacaagatctactacatgttcggattcctgttcctctgctacggcttgatgatcattacctctgcggctactaccgtcttgctggtgtatttcttgttgtgtgcagagaactaccggtggcactggcgcgccttcataggcgcgggtatgaccggaggatatgtctttttgaatgcgctcattttctgggcgacacgggtcagctttggtggattaacgggggcagtgctttatgtgggctattcggcgctgatcgccttcattgtgtttattctgactggtatgtttttgttcccatgtcttgcggatgggcttcttttgctgacttctctccaggctccattggtttcttcgccagttgggcattcatccaccgcatctatggctcgatcaaggtggactaaaggttttgctattggtgtaacatttagccttgcatttttggtcacgagagaagacataccctgttcttgtgtctgtttttgtgcccttcttttctttccaaaaaaagaatcgttctcaatgcttggagaggtctcatggcagatagatagttgtttgatatggagaaatgtatatacgcggtaatgagattgtctgccaagcccagcctcgggatgttctggacctccgtcctttctcgcctccttcaacctcttctctatcttttagaaactgcatttcttgtattaacccccttattatatctttcctcttacgtcgccggggccccccttgcgcagacatactcagccacaacccagccacacatcccacctgtttctaccccgcgtcaccactccgggctcattgcaagccatcactcccagatttgttttgaacttgctcttgatactgttctagagaactattttttgatcatgggaaagtcgtaagttctaaccatcctctcaccctgtttgaaatggcggtggaacggactccgcggatctcaggatgcgcgtcatctcgggagcaagccagtaccaaaggccccgtacttttggtctgagaatcacgctgaataccctgcctacattcaaaggagaaccctgcgctgaccctcgtgtttcacattctacagtcaatctaagctttcaccgacgcagctcgatgagctgcaaagggcaacacatttcgataagaaggagctacaacaatggtataaaggtatgcggatatatgggaaacatacgaaacatcaagtctcaagagcgatcgctgattatgggcatgtctaggatttctcaaggactgcccgtctggtactctgaccaaggaggagtttcagaaaatataccggcagttctttcccttcggcgacccgtcatcctttgccaattatgtttttcgcgttttcgactcggacaacagtggtatgatcgatttcaaagaatttatctgcgccctttccgtgacttcgcgaggcaagatggaggataaactggattgggcattccaattgtacgatattgacggcgatgggaaaatcacctatgaagaaatgctggccattgtcgaggcgatctataagatggtatgcacaatgcagttcgtgaaatcacgatacccttaaaagaactaatgagtatacaggttggatccatggtgaaactccccgaggatgaagataccccagagaaacgcgtacgaaagatcttccgcatgatggacaaggatgaaaatggcagtcttgacatcgacgagttcaaagaaggcagcaaacgggatgaaaccatcgtcagtgctttgtcgctttacgacggattagtttagattgcttgggcgaatactggcgcaatgtgaggcattcttttttggacgggcgagggggttgcattgcatattctctgtcttatctgttttctgtttctttactttttttttctcctcttgtcatatttttgattaccccctcatatcttttgtatatttgagacaagtacaaccttggtagtgaagtgtatgtatacggtagtgtctgtcaacttggctttgactttgatcggactttgacgctgtgttcttccaaagacgacaacctcctttaggcagagtgggaatggtgcgctggctttgataaggatcgaaccagtccattgtcgcctcgtatacggagtatagtatgtcacatcaaaatcactcaagtcggcccagcagactaactaccagctcttctccattctatctggaattgatgtacaagggtatcgggaagacgcaagagccagtccccggcatgcagggcgcgatctaatatactggaatgagcaaggcaaggaaacatgggaaaggaaatatgtatcaaaatcatatcagaaacaagaagaaaagcctgttgatcagatgatcaaaaaatagaagaaactcgtgagacagcgtaaagaggaatcaatatagatcaatatcagcccagatcaaccacatgctaatgaaacaagcacgaattgcacgaggtccggggtgcacggcagacagctatcaagcctcagaagcagttgcgcaagggacgagcagccttctgacagtgggttaggatcatcggcgatcaaaaaaccagctgctgcgcttcccgggcgcttcttgcgattgtacgcccgcaacgttcgaattcgccggcccgtcaccacccccgcggagtggcttcgcgatgcgcgatcccccgaagctaaaactcgcattcccatccatgctcggtaagccgcgggtggaaccttgcttcgctgcttccagacgttccttaacagcggtgagttgagcttcgaatctatcagcgtagttagtatcgagtatcaacaagcgaaatcagggagaataagtcaacgcataccggtggttggcttgggtaagcttttcttggctctcctggagcagggcttccaggctggcaatacgctcatttcttgcaatcagtttccgctcagcgattgccacctccttcttcaaactactgttttgttccacaagttgacgctgcacgtgggttaattgctcgaggttgcgctctaagaacgccatcttcttctgctgagcccggttgttcgacgatcgaaggacgttgttatactgctctcgtgcatcatccagggagatttccaactctacaacacgctcgcagcggttctgcaggtcacgcatgagagacttcttcatggcatcgaactcggtaatctgctgctgcaaggtcttgcttgcggcaccattggtggaggtccgggactggctgtcgacaagcgattgtcgcaacttggtcaactcttcatccttgcgtaaaatgtcagaacgaagatccgcggccgccgcagtctcagcctcattctttgccacgtaaacgtgctctagccttcctcggatctcttccacatcgccctcgcccaagttgcgcgtcaagagatcttcatactctcgttgaaggccatctagcctcttttccaagtctgcacggcggctgtcctgcagctcaccaaagtcacttcggtcgttcacggtcagctcggcttgtcggataaagccttgcgtctcgacaagattcgtgcgaaggtcaagaatatcgtctggtgcaatgagttcacctgcagagctgatttggtgtagagcatcgacgcgctggatgaggtcttgcagcttgcgttcgttatcggagaacacgtcgccaccgaggtcaaacccagccatcatcttagccattttctcagtcttcttcttttctttctcatcaagtgctgcagtagtctcctttgccctcattcggacatccagaagctgctgcttaacttcatccaactcgcctgtgagttccgagttggcctcccgaaggctatccatggtgatagcggcttccttgctctcataggagaccttctcgagctgcatacggagctcgttgacttctgtgcccaagcgctcattatccttgccggttcgcgcgccattctccttcatggacctaagctcgtcgcgtgcctcacggaggctgcgctccacgttgacaatatgtgactccttctctgaaagctggtcttggaattcattctcacgacgcaagaattcttcgcgctcgtccttctccagcaccaagctgggggtgctggaccgatctccaacccgtgaatctgggcgcggggtttctgaacgcgcagtctcctgcagacgtgaaggcgtactcggccgtgggccgcgggcttcagccttcgtgtaactgacaacttcgtttcctcgagagggggtccattggtccttgggaacgctgtcaccgctacgccacaggctgacttcgccctcaagcgctgagatgtagctttcgaaattcgtcatttggctttgcgccttgcgcagcagttgcttcatctccgaggagctcagctctgcattgaccttagccttgttcttgatggccttggcgcgcacaccaaaacgcaaggttgagattgtttccgcatcgttgtagctgctaggcgaacagttgataatcaaagtcgttcgagagttaccaccgagggattcttggagaattcgagtgagtttggagtcacggtaaggaatgtgtgtcgatttgccgtcggtcaatgcgttgattaccattcctagcgcacttaaactcttgttgatcttcttggcctcctccagagtctggccacttgcgccggtctttccgaccttttcgctaccagccaaatcaaccaaaaacaattggccactcttagcagacccagtctcgacattcttctgggtgactgtgatcacgaagatggagtgggagcgggacgattcctggttcatattggttgcagcgacggcgcgtgctgctcctccccggcgcataacttcgtagacctcctgcacgctagatacgtagacttccagcaatcctttaacgtaaactccacgagctttctcctcgtgaactggcaagttgtcgttctggggcacgagtaaatcacggatccgctccatgtaaatttccatatagctgacccgcacggtgtactcgatgttgctcgggctggtcaggatgctggcgaagatttgctcgatcatgcgtggaataatacccttccctatgtcatcatcgatgtcggaacccatcatcgtatatgattttccagcaccagtctgaccataagcgaaaactgttccattatatccattcaaaatatcgtccaccgtcggtcggatagagaagtcaaagatatcgctttgcgcggtgtccatagggaacacccgatcaaacgtgaaggcccctgtgttctctcgggactagaattccgtcagtatagcctcgtgagttatggcttcagttcggactcacattgatgctacatgactcttcattttcgaattcgacaatgggcttacccccagaggacaattcgaccttgttttgcggacggaacctagcaaccactatatatggccaatcagtccaagtcctagtagaacgcactttattttattatgccagtctgtgcatacccttgatggtgttcgaccccgcggacctgtggaaccatattagtgatggccaacgcacgatagggccgagcgtactcacgccatatttgtagagtgacttggctatgacacgcgcaagctagaagatagagcccaaaaaggggtaggtgggccgcgaagttcgtcagaggcgtttcaaatggaaactcgtctgttgcggtgtagtggctcggaggaggggtttaagggtcagggggtccacgtgcaacgtggaccaaaacgagcaaggaacgaagagaaagataaagcagcagtcaggccgcaaagaaagtacggccaaaccaagaagacctacaatgggactttgcaggggagggggttgacgcgaaagagtgggatttcaactgttgactgtgaccccgtttgggcttaccgcccccggactcggatatgcaaccatcctgcagataagcttaatgtatagggaactatacaatgaagcatatgattgcacgtcttgtttacttgcacgcccatttatattccttacaacgaacacgtcacaggatcaaagcgcaaggtttgcaggaaatgcaggctaatgcactaaaactatgcgactaatcttgtaaactcggatgacatgacttggtgaaggaggaaaaagcatgagctagagatatcaaaaaagagagagaacatgaaatgaaaagaaaagaacgtcaaaaaaaagtggggagagaaaagaatacacaaactgaaagaataagataccaagcgccataaaccccatgctgtgcagatcaaaaggtcaagctgctgtgcccattcgtacgaatatcagcgcatcgaactcggctgagcaaatgagactgctcagtctcagttgtcctcccagcttttctcgaccgtctcacgcactcgcttggtgtactctttacggttgtctttgtagaggttcgaggcctcgacgttggccggagacgaggtgttggggtcattcagaagactagaattgacgagccgcacattagaatttgtatagtgatctttcatagacaagccagcgatacctttgaatactagtaagaatagccgccacatcatatgtcggactccagcggttctgcagaatatcgagacagagctcgccggtcccgtacacattaggatggaacatttggcttatgaatttcacacccgggggtttgttggggtattgttcttcaaaattcatgaccaggcggaatgtgccatcttcgaacggtgtatcggcggggccgatgatgacggcattcctagcatttcatcagaatcattgtcaagagcctcaaatcatgccgcggaagacacataccatgtcatgacattatcagcgactggagatgcagagacaccagctgggggatcggtttgcatgcgctgtgagtatggaaatgttagcggggcaaatcatcttggacacagaacaccggggaagaatttaagaagcaaatcgggctcatagggatagctttatatgagattatttatgggtacagtagaaacgtctcgaatagcctaaggcgaggtgacaatattgacgcgtaccttgaagtcccgcatcagacgacgacgggcggatgtagacatgatcgaatcggggggaggcggaaagtaaatgaaatggtttgctaaagctgtgtgtatgtagctagatatcaggatttgcaaatacagtcagaagtgaagggaaagaaaggagaggggaaggagaggaaacccgacaggtcattgatacggtaaggcgatatgcagcgaaccgatagaggggaagtccggatgaactagcccaatggagaaaccaccccaatcaggctagagtgaatttccgagcagtttcccggggccccgggaaactccacggctactccagtgctgactcagcaagaattatgtgacctcgggataatttccttaacaaaaacttttaactagcgctttcccaaggttccaaggttcacctaacccgaccgcctcggaagaagcctcggttcaagcggagtggcggttgtaggcggttataagggcggataattttcaatacatatgcagatgcaacagcattcctcagttcttcgtccttaatcatcccttctcacaatctgatttctcaatactgtgacctcacccactcaccccctcatcttaaaacaaagtcatgatttccgcaggcatgtctgctcgtctccccaaacgggtcttccccgcattttgcccccagcgacagttcagctctgcacgcccgacatgcaaggagattcaggaagcttacattctgagtgcatctcgaacaccaacgacaaaggtgggtacctttagagaaatctcctctagaagaacaattcgctaactcccaaggtagttcaatggttcttttgcatccgtatcagcacctgagcttggcgctgttgcaataaaatccgccctagccaagtccaaggtacctattgagaagatcacggatgtgtatatgggaaatgttttgcagggctcagtaggccaggcacctgcccgtcaggcgtctatatttgccggtctcccttccactgttgaagccacaacaatcaacaaggtctgcgcttctggcttgaaggctgtgtcacttgccgcacaaaatattcaacttggcttggcagaggcacaagtggctggtggtatggagaacatgagtcgcgtcccctattatatggcacgtgccagccaattgccaccctttggtgagatcaagctagaggatggtctcatcaaggatggtttatgggatgtttacaacaatttccacatgggtatctgcgcagaacatactgcgaagaaccacagcgtctcgcgggaggagcaggatttatatgccatccagtcatacgagcgcgctcagcaggcatggaaggagaacaagttcgccgacgagattgccgcggttactgtgaagggcaagaaaggagataccattgtcgaccgggatgagggcttcgaaaacttgcgtatcgacaagttgaagggcctgaaacccgcctttctacgagatgggagtggtactgtaaccgctggcaacgcatctagcatgaatgacggagcatccgctctgatcttgggcaacagggatattgctcgcaagtatggcggtggcagccgtgtcttggcccgtattgtttcttcggccgatgctgccgttgaccctgtagacttcccagtggccccttccaaagcagttcccctggcgctggagcgtgctggaatcaccaaggaccaagtggcggtatgggaattcaacgaggcttttgcggctgtcatcaaagccaatgaaaaggtcagtgccgtatttgtctaacttccataccagatctaatttctagctcctatagattctcggtttgcagaacgccaaagtcaacatgcttggaggcgccatctctctcggccaccctcttggcagctcaggctcacgtatcctcgtcaccttgctccaccaattgcagcccggcgagtatggagtggctgcgatctgcaacggcggcggtgctgcaactgcgatggttgtgcagagattggatcgggtggattgatttcaccaacaatgcaatgtcttcggtggcaagttatgactgatgccctcaaacgaacaatgcagacttggatatcatcccgtgtagcagagacgtgcacttttcttggatttggaatagcggattggccgaaaattgtatttactcaccttttatgtataaactcatcgcctgtttctttgcggacctttttatatggatacattagtactatgtatcattctcgagctattttttcttcatccctttccttagatctcttatatatatccataaagccattaatctatctttcgctcccgttttgcaactttgaagtgatctttggaggattcttagggtcttttgtggttggtgcctgattcctcaggaatcaacccagcagaatgcaacccaaacaaaagcagactctggcttttcttcttcatatcctcatgctctacctcgcgaacactttatataccaataatgctgacacggcaaggatccgacatctgacactatgctgaaccctgtggccctgtcattatctccgtcttgccatgacgccatttcttggtccccggacggtgagcttgctatcgctgcgggtgaatactttcaaatcctggtatttatctagttatccgatgagcttcaatataattgacattttcatagacaccaaaaactagcagagatgaggactctgcccccaactcaacccaagattggctcataactcgtgttagagccaacttgtttacgaactctgaatggccgaactaccttccgggaaatcgagatgatttctcggtcgctgcagacctttcagaaagcaatgtggtcggtctcgcttggtccccagcaggactaggcaaatatcgacgtagtgtcctagccgtgctgacgtctaatctggtattgtccctctgggagcccattggccttaagaagcaatggaccagggttgccatcaccaatcatgtattttggtcacagctgcagccatcacaggacccaagtagccatgcctttcggaaggttaacattcgatctttcacttggtgcgagtctttgaagccatcaacgcctaccgcgggcgcttcctttttacattcgcacgaaagccgctggggaattccactgctaatggttgtgaacgatttcaatgaagtcatgctagtgcaggttcgcagatcagacccaacgaatagcccttccaagccctatgatcttcagattctggcgtttcactctctaaagaacccggaaaccaaggacagtccgttctgctctggatcgctcttcgagaaggcaatgaaagagagacaacgtactactgtgctttcctgtggtccgtggcagatttcacccgcgacgagcctggggaactttggctgcgcagtcaccatgatagctgcggtatgcggaacgcagcttcggctaatgaaactcaaagtgactctcgggagcgagctcggggagacttcacaacagtacacgttaagcgccgatttgacagagcatcccctggatcaattgaatgagaaatgggcatatcacaacatcgctggccctcttagatggctccataccgtacgttcgatttcttacatccatgctaaaatgcgccatttctctaataaaagcctaacagagatcatccacaaccattgtcctggcagtgggcgccatggcagcattcatcgccatatctatgccctacgatacgtacacaggtagcattagcaattctgatgccttcgtatttcatgactatccaatctacgagccacaaaccgaggacaacaagggccatcaagcaaggcacctggagccaatttcgggtatgttatttaaagacctatgaggccctttcagcacttctgaccagctatagcaatgctcacttccgtgaatgaacaaagcgacacatgcaagctctacttaggtacactcggtggaattggcttagtcacagaacttcgccaactacaaagcaacagcgctctgcaacaaccaaaatggaaacgcatgattgaagagtttcaggatgactatgacttagagcacgacttgggaggaatgtcagtttccaggatttggggactcgcagcctatcgcaacatgactgcggctatcttcacttcacatcccacggacatgatcgagtatcgcatcacctctgacgacaggtctatggttgtcttttcagaagagagtggacccacgatcaatacccaagccctatttgcggcgcaaatccccgatgatcataaccagacaggagaagtgatacgtttcgtgctacctggtgaggacggcaatattgaacccgacatggagagtcaacgcctgctttatgccgtagcttgtcgttccattgtgggtgaagaggacaagtcgcttcggcttcatactcggcggtctctagagcgtctagcagtagtaacaggcgcggacctgagcgatgagatttccaaatgcaacagcaaccccgtcccggtatctgcgaagactatggatcaggtcactggcccaggcggccacatttatgagaagtgcgaagtttgtaatgcgggaattgggtggccctcagcccagttggctcagtgcgccaatggccatctttggggtaagtcacctcatggtttgaatttgatagtaacgtgctgacagttttcattcatatagaacgatgtggattgtccttccttgccattcaaggacctgggatatccaagtattgttttgtctgtcgcaaagaagctctcgatgaagaactcgtggcatgcatgtgtggaggaaagcaaggtcgaacattcgatgctctctttgagacgtttgatatctgcttacactgcgcagccaaattccaggccagttactaggtgtcctcagatagaatctgcaataataacagtgtctccttgatggctagcggctgcaaaaaaagacaagatatgtgatgtgatattgccacacaatgcttccaacggataatcatattcatatcatttacagagagctatctatgtgagcccaaaaagggaccccgcaataggatcccattcgtcgtcccatcggcgagagctttctttttgggcacctagacgaagactttccaatttgtcgttctcaccgaacaggtcgaccaagtgctcagctagctcctctgagcttccaaagcctaacccattcacgccctcagtgaccagctcgggccatgcttcgaaacgatcccacccaacaacaggaagaccagccccgaacatatctacaaccttcatgggcagatctaccccactgctgctggtatgcagactaactcctagagatgcggatgccaatagccgagcatattctggtacactcagccacgcagttcgaattgtgactttctgtaacttgctggacttttcaagggccgcaatctgttccaaatacatctccttttgtgggccctttcctgttatgatagccaaaatctcggggaggtgaggctgcactgtgatggccagttccgaataccggaggagggcatcgatgaggaccgagaaatcttcatccgcagtccatgacgttgaactgactagaacacggagagaccctgctttcaaatatgagtgaaattctttcgtttccggtagagtcgtgaggaaatccattcgtgcattgggatcgaggataggattgaagtgactggcagggcggtcgtgcagtggcaggacaggagctggaaggttgaaatccttcttgagaacggatgccatggcattggtgacgcaaaagtgggccgaagcagacttgcaaaataccttctcataccatatcgacattttcaccaatggatgggttgggccgagttttaacgcaagtatggaatatccaaaattatgccaatcaatgacgagccttgtttgccgcaggaaacacacaagggaggctatagccagtgtaggaatggaaggcgggttcttttattcaagagggagtcagtacttcaaatgaagactgaggaacctccctttcagacatacctgaaccaaaagccattgggacggttttgtggtgtatgcgagacacttccagagacaggcgatctggaatagtaccttcaagggcccgtaaattataaacagcagcttgttactggtctgtaggagagcgggatgcgggcgaagcggaacaatcgaaatgttggggttagatatgatatcaggatgaggatcagattctgtttcataaacggtggttagcgatcctatcttacgttctgtatcaaggggtttgtactaaccattatacccaataattaccacctccccgccatgcttcgcaatgctcaatgcatgatactgcatgcgcgggcttcggccaatgtcaccaagaacaagtatttgaacacatgtcttgcgcctttttgcgtcatcggatcttggagaccctgcttgttctggttgatattgcgaaggaagtaacagaatcaacacagtgagggcgctagacaggccgaacactatgctgatgaaggtctcgatcatgatggcaatggcacttcaagtatttcgctcatagtattgatcagccctcaatgacatcaatgatccttagagagccaaccagcagagggaatatccacagttcgatgcttaggaagtgctcgcggctccggtgtcccgaggtcaatcatccattccgatacgtaatctgataaggattcacgtgattccccttatgagaacctttggggagacgggcctttccttagagatagtggcaatttgtttgggcctgtacgtggcgctcactttccccaattatattactttccttttattaccctccggtcctattccgcaatgctggatctgctgacaacctgcccgctaatctgagctctcgcccgctccaccctcgatatcttggcagtgccccatctcctatccttttcgttggaccttccagctgctgcgcaccgtcagcatctgaagatcatgtcgacgggggcaccgtctctgggcgtggatttcacaccacccaatggacacagtcataatcatagtcatggtcgcagtcgtggccatcgatccaaccgctgggcgcaacctccgccttccctctcacagccagctgatgccacctttcctgaacaaccggagtcaatcaatgctatgaattcgacttattcatatggggatacacatcaaatatcagcccacagtcaccatgcgcattcgcattcgcactcgcactccagtggacaccacaatcataaccatagtgtgtcatctcttcaccacgatgtgctagatgaccaccatttgaaagatcccaatggcggttatggaatattatctacggataccactatacaggcagactatagtccagggaatatgtacgtggggttagaatgttattgacgagtaaaagctgaccctaattgcagcaacgagattctgactagtgcactcatcgtgctgccgtgggttacgctttcttggtaccagagacaaaatgcccaaagccaaaatctatctagcgaaggtatacctggtacaactgcgagcattactaccgggcaagttagtcagaagacctgccttttgacagcgctcaccctcaccctcttcggctgtggtcaaatactacgtatcaactaccaaaaggctggctcgtccatgctcttgtccgttaatttccccaaactaaatgtgaagaacgtccaaacttcacttttacaaattgtctcagtggcactgccaatatttgcagcgctcaaggtcggaagttttttggttgcatttgcgctgcttcttgcgacggcatcgagggtcccagcaatcatcaatagagcttcgcacactcaagagaaatacggtcgaaagatcctatccattaccctgttagtggtggttattatatcgagtttccttgggctgaaccatccttgggacgtatctccagtcattggatatgccgccctattaggatctgtgtttattgcgcctcccccattcccctctctccgtcatcatagacctattcctgagcctggtcttgttgctgcacagagcaagacttcacgtctgagtcactcctccgctgtggtcacgactgatgcaccactggccgttatatctgggtcctcccttgcactcctgagcatacttctcaaccgaggacttgttttcagcatctgggaactggtatatctccttattccgacgggtatatttgctacttctcttatgattttcctgccctccagcccccgctctcccaaaaaggccggactcgccatttgcgccggagctgcagcttttctttgttccccacatgtccaggatgacttgctcatggtttatgccacacgtggtgtcttggctacggcttctttctttgcctctcgaagggatgacattcatttgcatctggatacgcatgcgcatagccacacgcacattcattcacattcacacacaacatcagaatcctcccgagtatcaaagtggcttcttcataaaagcgaaccatacccgttgctgcacagcattctcaaagagaaggattcccgtagcatcttctacttcatgtggtgagttatgaaatccaataattgtctgtcctgaattactgctaacattttcagcctgaatttcacttttatgcttgttcaattatcatatgggttcctaactggatcattgggactgcttagtgacagtattcacatgtttttcgattgtcttgcgcttgttgttggtttatgtgccgctgtcatgagcaaatggcccccgaacgctcgattcccatacggctatggtaaagttgatactttgtcaggatttgccaacgggattttcctcatgtgagtgttgccaaagcggtgcgtagaggcaaattctaacaacatacaggatcatcagcgttgagatcatttacgaagcggtggaacggctctcatcggggagtgaggtgcatcgtctaggcgagttacttatcgtcagcattgctggccttgcagtcaacttggtcggaatctttagcttcgagcacggtcatgctcacgggcatgatcatggccacgaccattctcatggcaatgagaacatgcacggcatcttcttgcacattcttgccgatacgcttggttcggtggcagtcgtcatttcaaccattctcgtgcattactccggttgggccggctacgacccgttggcatcatgcttcatcgccatattgatcttcgcctccgctgttcctctagttagcagcacggctaagacgctgctactcactatgccagccgacaccgaatatactcttagggaaacactagcgggagttagcactttgagaggcgtggttagttatacagtgcccaaattctggcttgatgatacaggaccggtatcttccgggcatagccattcccatgaccattccgagcatggggactgtgagaatcaccatgatcatagccacagccaacaccatggtcatgagcagcaccacgatcatgaccacgatcatgcccatgaccatgaccatgaccacgatcacgatcacgaacatgcgcatgagaagaagccccagaatattttcggtgtgatccacgtcgtcgcttcccggggtgcagatttagaagacgtacgtcaacggaccgtcgacttccttcgagagaaaaacatggatactcttgtccaggttgagcgtgacggagatgcgcgctgctggtgtaacggtgggagtaagggcttttgattggtgacaatgtttcaaccatcatcaactgttctcaaagggaagccagggtttacggtacatttaatatcgctttgccccggccgatgtctatatatctcttgtacagataggattggatcggttcgccgaaagattacaccgatcaacagcacatagttttctccgcagcatcggaagtgcaaggcatatacttcaatgattcaataacgaaccccagttcttcatcgcatcacatgtaggcgaaacctatcccggaatccttcaagggtgaaacttgtacgacccgtctatcagttatagactgtcctgaatggatatccttgatctgagccctacatttctcagacaaatggagtgcagctccgtcggtgcccctgaggccagatctccgtgaattgcgacacgatgctccttcgggtcacacaattacattgaacctcggcagcacatggcgcgaaagtccagatctacgtattgtgttattctgacaagagcgaacctccgtttcatctcctcgaggttgccagccttgtcaactaaatcggcaccaccggccaacctgccgggccgcggctccagaaaaataacctgtagcatctgaaccgtacaaatggaagagtgacatcgagtcttgtgctaccaaccactcgacttctaggtttggacagaggatgttacgacattctatataccttccgacaccatcgcaaccccagccgatcctttctgtcattcttctacagagcctactacagagatatcaactacactctacatttgactctttcgtccagtatattcaatgtcatcagcttcagcttcgaccgcaaaatcaccgtatgccgacgaagtcgtgcgaggaggatatgcaaaaatatttgagggccatacagtcttcctcaccggaggtactggctgcctagggggttgtctcctctacaagctagctctgcaactgccaactcgcaagattttcgttctggtaagggggaactcccagcgggctattggaaaactgagggaatcgataccaaatcatgcacaggctattttagccacgaacaaagtcgagtttgtgattggagatatgaagacggtgaactttgggattgaagctactatccttcagcaacttcaagatcaagtgaccctggtcattcatacagcagccaagatcaaacttgaaggtcccattcgtgatgcactggagaacaattgtctccctgcgctggaaatggcacggattgcctctagattccggcgactgaaactcctcatccagatctctacgtcatacgtcaatagtcatcgtccggatggcacggttttagagcggatatatcaattgggaggcaaagaagatgcagaggaagaactggcatccatattgacgctgggcacatcacctcacgcgggcaaattctcatctacctacacccaagccaagcatctcatggaacgtctactactcagccgcttccctcttcttccaattctactgctacggccaacaatcttcggtcctgcgctcagatacccttactcgctatatggaccggaggactccacgcctctcaacaagtttactaggctttggttctctgatcgaggcgccacgcaagtttggcatgccacggaaggctataaaacaggcgccaatatcctagacgagattcccgtggacctcgtagcaaacgcatgtctattgcacgcagcagcacggactacgggcattgtccaggttggttcccagctctatcatccgattaccttcgatgagatcttccgaatgggcctggaaaatgccacgcctgcagcccagcgagagtttccgaagatcatatttaccgaagatcgcagcacaccgcaatgctttcttgcggaattgattcaagtaggaactcgcaactggttattcgattgcgggcggtcctactggctcaaacaggtgagcgggccattgagcatgcaggtttgcaagcatgaggcagatgctctgaatttgacacggactcacgatgtcctcggggctctaaaggagaaagctcggatctgaactgagctgcagggaaattggaggctgcaaatcggctataagatactttgtagcccccgtaatcttcgagctatatgagacaaatatgaccttcgtatactccacgctacgtctatcataatacttcctcgattgatatttatctaggtcattttagagaaaggcttcctcaattaaaggtagcttcggtttaaataagccgagttcattatccactgtagtgggggattccagtataggataacccagcggccatatgatctaaaagcatccctgaaagatagcaacgcagacaccttccacttctcttcttggtagtcaccccacggtgttctcctctctagcaccctaatattcccactgacgactctgctctcacgcctgtttcgtaggcagggtcccctcttcacaacccagtaaacttgctgtttcggatgactagaaatacgttgattgagtgggccagccaacctgttaaggatcatagtacacagcaatagaacagaagctattaatatttatctatcgggtttcttcacattgggtttcctcgtgtgaattacaaaaagcgggtatagtatatcaaagtcccatttttttccgggcccaagccatagcattagcccattccatatccccgggatgcagtgcatccaataattcggagaccaatgcccggcccgagtctcgagcccaccaatgctggccatcaagctccccgagcaacacaccccagtgcatgagaatcaacagagatagaggctgtcggcgtcgcacattgtccacgaattccttgtcgctcatagcgagccaagccagaacattggcagcatcaacagaattgccaactctggctgagaaatgccgcagatagacaatagcatctttgttgacctgatgctgatcggggtcgatactagcgagggcctcatcgttcaaagaaccgagtcgctccagggcatcccgcatatcgctatctatactggctaccccactattccaatagtttcttcgacgggtaaacagctctaatttaatccaagattcaccaatccggtggatttttctcacgccttgcaagagttcaaatacaacgacaatattctccgttatgcttgaactttccccgcgggcagcagtcactcttggtagagcgatgcctataacggtggtgataatggactgcgccagcgcagcctcgcagttcattgggttgatactgtcaacagctgcgcgatatggcgcaaatgtgagattgtgatattggagggcgatatcaatgtacaccagcgatgccggtggctcgattgtggcggcaatatgaagagcccccagagccagaatgccgttcattaaaaaatcatactgaagagccaggcgaggaatggcaatctgccagacgtaatgctccgagctggaagagcaaagactcttataggtttctgtggaaaacttatgcataagctccagatctcgcaccgctgaaatggttgaagaaacgggagctgtcagcctagggatcctcggccgcaggggagtgtctataatagccaacggggccggggtctggcttgctcgtgaatcgggccgagccggcgctcttaaatatgtgcatgggagttcccgtgagatacaattggagcacggtggccccttttcgtcacactgcattcgttagtctcgtcatttgatggagcccgggacaatctatggggccatcccaagtttccggaactcaccttgacgcgacgtctcttgcactgatcgcagccttggcgagatttagtgtgcgctcggcgaggaggcatctcggaaaccacggtacctgagggtccatgtaaccggttcgctcggatccttcgagacgtggaagagtccaagcgcgggagagaagatgatgatgtggaggagtcacgtggaccgagactataaaaagacttccctgccttgttttctctcttctgtatggtttaatcttttttacagtttctaccttctacttcttcgtccgggtgtcagattatgcttatttgataatacttttcaaaacgccgtggtcgcttcgtcctctatttcagcattagccttacacagtcacatgtcccaatatagccctaggacggacttgaaagtatgaactcaataccgactgacattatctagattctacagattctacagattctagaaagaaatgtccatctcggaccaaaatctctcggaccaaaagcaacaaatccccgaaaggatcaaagcgccttatagaaaacaagtggatccggcgtaagcgacgtggagagaacgagaacgagaacgagaacgaacgagaacgagggcaagaaacagccaatagcgatgcatttggagccggtttcatcgtgttgaaccaatttagggctccacctgctggaggtgttgttgctgcggccccttgatattgagttgacctgcctgaaggctgataaatttatgatttgatatccaacccctccagggattttctccattgagagactcgaggcccttttccttgttatcccaccttctaggacttactctcactcagctctcttttactctccttcctttactctatatttctttccttttgattacacatctcactcaacatggcgggctatgacacttgcttcgaagtaagcccacaatgtcctgttgaactcacgacatacggttactaccccaatctcggcggaaacatcttcttcacggtcgtttttggcctactcggaatatgccaaaccggtctcagcatctactaccgaacatggacattcttgatagctctgctcattggaacatttatggaaatggctgggtacattggcagggttcaaatgcattataatccatggtcggcacctgcattcaaactccagatcgtgtgtctggtgctcgcgccgaccttcgtcgcagcgggtgtctacctaacgctgaagcatatcattctgaccttgggacctgaacactcgatcttgaagccgcgccttttcacctggatcttcatcggatgcgatattggctctcttcttttacaagctgcaggaggtggtgtcgccgcagctgctggtaacgatgacttccaaatgctcaaggcaggcgacaacattatcatcgctggtatcgccttccaggtcgggaccatggttgtatgtggattctttgctactgtcttcttctggagggtcttcaaacacggtgatgggtttgcgggcgagaagaacctcgatgcaccgattatttccaagtggctgccgttcgtcgtgggcgccgaggtctttgcctatgtcacagtcttgattcggtgcatttatcggtaagagccaatatgcgtacaaacaagacactttactgaccccgatatctagtatcccggagatggctggtggctggggaaacccgctgatgcagaaggagaatgagttccttctcttggacggaatgtaagtggtctcttggttcttttgaaagctggggaaatcatagctgacgtgtcattaggatgattactctcgcctgtctggccttcaccgtcttccatcctggaaagttcctcccatcattgcgcttcacgtccaagacccgcacataatagcattcttttatatttcttttgagggtgctctcggcgttttttagatactttctttccagcatgtgcctatgtcagagatgatatactctacttaatcagggtgtaatgaaaacataagaatcagttgtcgctctacatttgtgctagatttacgtcagattcggaaattatttcggaaatagattcgatccaaaccagacaagtacgctaaataaagctccagcctcacgaaatcgcaaagaaatgcaccacaaagtgaccagcgatcgagagcatggcaaattattgctcgctctatgcaataaagaagagaaaagaagagaacaccgctcgccgcggtacattgaagaagaagaaccccggcaactccatgttaaatcagacataacccgccatcttaaattgccgtgtataattaaatcgtgtctagtcgtccaacgtcagacggacgcaccgtcggacacgcttcttaaactccgcagggtcctcacgccatagccgagcagcctccacattcgccgggctctcgtcgtttgggctggaaagcatagagatgacggacaaaaggatcgtctcgggtgtttgcacgggagaccagcgttccgcagccgactcatagccgtatttgtcctcctcgggcgggtggagaatggaaatgcagacgtcgccactctcataaactattaaatcggagtaaattgtgagtaagttgtctgtgataaataattcaaccggaaccacatactattcggatggaagataggagattcgaacttcatctttggcggccggtgagggtattctgttgggaaagagagacgagccctgaaaaaaccacctaggcaagcaaacttgtgagtattcttcaatgcatttgtagcaacatatccctagacggcattatgtttgccacagcaccagtcgaggaattgacgtcaaatccatagagaaatgaggccatcacatacctccatacagcttcacatcgtctgatatcatgagcataacttcccattcgaaaacgttattatcgaccaagccacaactgatgccgggaatatccttatcggactgcatctgctgcagttggcgggacagcatgcgcccggcgggagaagtcgccatgctgatagtcgaggaagataaagcagaagagtggaagggtgaaattgggtcgatatctgaaatcgggttcaatgtcaaaagaaagacaaagagtaggagatgaggagacggtgaggggcgcaaaaagaaatgtaggcggtaaggctaaagcggggtttgatagcctagatggggaggcggtagacaccatgggcacgtaattagttgctactttgtatgtctaggtagccctggaggtatagactcgatgaggaccttagggttgtcgttatgtttaaatctcgtagtgcatgaggaaggtgaaagactattgtatgaggcaaacatttcaatctctcccaatgatatagatgtagcaaacgcaacaattacacacacatcccagcatttcatcatgtaccaaacatcggatctcaatggctttttactttcagctcatttagagtccaggggcacccatatcgatcggtttggcagtcttggaaatccaaaagatctgaccaccaagtaccagaagagcgaaaaaaccaagtgccacctccatggcaaatgtcttgccaataaccttggcgaagcggatacgggcagcccagtcaaaggtagtccatgcatccatgaggccgatcttgccgctgccaccggtgatggccggacggactttgcccccgaaagagcgatcaaatggcacaatagtctcatcctcctcgggaagcatggaggcagccacacggacaaagatgacacgagcgggcatagatatcaagaatgccaaaagagcaggaaccacactgacgcccatgaagcggtagatggccacaataggcgggacttcctgataaccggaaacatcgagccagccagcaagattggcaatggccatggggatgaagaaagcagcagcggtgaggacatcctggagagcagcggctggggcaatcttgatccaggtcttgtagctggggatacgctggtagaagcgctttggagagggctcagagataacaatgtgcacccaggccatctgccaagtagccagtaccacgctcaggacggattgaacgacaaactggcccaaatatgaattggtaggcacagggacaaaacctgacaggaacccacgggccatagtgtaggccacaaacatgctcattccacggaagcgagaccagaagccagcgcgggagcggaggtgcttcacagtggtgcgcagcttgctggtgataggcttgaggggagtaggagcgagcagctccggatcattctcgtcggttggcttggtgggatcgggactgggaataatgcgtacgtagatatcggggttggtatcttccactacagccagagtggagaccaccattccataggtatactcgatctgtcgagtgttagttccacaaggtgatatctggaaagatttttttacttacagaccagaaaacaagcccaatcaaaatagcagtgatagcaaacagagccaccaagcctccattcggctcctgcttctcaggcttagactgcatgtgagtgacagcaagctcggtgccccgacgcatcaggacgttagtgacggacatgatgaagccgacactggtgaatatatatataatatattcgatggaaaagagatggaaacacgaggttggaagtgcaaagatgagaggggaagacgggggcttttatctgatacaaagccaggcagcagaccactagcgccggagtcgtcggtacccttagagtacttagagttctgacggactccacctataattttaggtacctggcgtgtaccctgatcagcctcacgaggaactcggacactttcttggacatttccatttccctcgaacaacttttgttctctctatgggatggccatgtatctactattttgtactacttcttactgccttggactatttgcttcaaaattcacccaatcatccgatgatataaatagaaacccctgggatcatcggcgtccaattcctccgtgccgaccaaacattgccaggttgcctccgatcaccattggcccccgacatgttagcgctaaatccagggtgcctaggcgaagccggctcggccaattctccccatcgagagtgaaaaaaataaatgaaaataccgcttgagcctcaattgtctcaggcaaagtgtatatggctagaatttgccagcttgtatacattctagatccaatgtggcatgcccaactcccagaaatcaccagaaagtgactttctataaatatcggatatcaaccaaagatctaaaacgaaccccaacatgaccagaaagatgcgaaccaatcaaagccaactcatggtcgcagacaaccatccgtggatgggagacaaaacgctgaaaaaagagatcaatcatggtatgtacacaacaagaattctccaactttagtcaaataacttcttcatgcccttgtgtgccagctcaacgccgaggaaagtggcggcattggcaggcaccgcacgggcgagagcaggtccgaatccagggaagaaggccttcaaaccgccgctagcgtaaaccgagcggataacaccacccatggtaggcttgcccggtgcgctctgcaggcgggacttgatggtgtcaacggggaagacagggatccacatagcgataccggcggcaccaccagcgcacacaacggcagatagggagagctcgcccgtcacgttgccttcggcatccttgggggtcaaggagcgcttgatgtactcgtaggccgcgaagtaggcggccgagccgggaccatcacgggccaacgtcatggcgctaccacggaacacgctgcgaacaccaccttccttgtacagctggcgcacgacatccagaccaccggagtactgaggtttctcgcccggagccagttgcttctggccctggatctggaggaggaccttgacacgctcgaagggtgccgtgatcagggtcatggggatggcggagaagaagcctgcagaagagatttgtgcgatggagtactgcggggtgtcgttcttgactgggacggtagagaacttgctcacgagagtcttgcccacgtcgtaaccctaatttgttgttagtatcgcttccggacgggcgctcgcagctgcgggcgcagagaaaaagaaaaaaagacgaacccaaaagctgacggcaactgtgagacaggactgattagctcataactcgatcaatttcagatgtgagagccattatggcgcatgctagagtacttacacatgggagtaactccaacaagcggcgcagagacaccggcatacaatccctaggaaccattgtcagttcggtcgcaaagtattcaatgtgcttgtggtgatcatactcgagccaatccttcacgggctaccgtcttccggaccacatccatggcacctgagtaaactcccttttcggccgtctgcaggcgcaccttgactagatcaaacgggtgtccaacgacgacagcgcagagaccaccaacggcaccggctgcgagagagcgcagctgtacaattgtctggttgaccgccttggtctcgatgtcgttgatctcattctcaagctgctgcgcggtgggggaggtagaggaagacattgtgggcgagtcggagcggggagagacagggatggagatagggatggaggatgaggggagaagagggtgaagacagcaggggccaagagtaagatgggaaagtaattgatagcgcaataagaaaaaattgaccggggatcttcaaatgatggagacggagacacaaccgaagccgactggccttccccggacgaaggtgtgcctcggttcggcagcggaaaaaccgactccccgtggtagatactagcaagtaagaaggaagtctacagtactgttgaactaaatattatggagacatttggcatgttttgctgggtttcctataagaattgaattagaatatactcctacggcgtcagtggccccgagtgcgccagtccgggtgaacgggagagctcaaccactccacgttttccccgcggaataaaggatggctgtgtcaggattaggtttgctccatctctagcttttctcaaagggtataggtgcaggggagatgtgaagtgcctgtatcgttgcaaatgtgtacatgtacggagtaagtacttggaagtccgagttctactccgtagggtcgcaatcacatggaaatccacgtgctttatcaggacgagaattagtatttatacatccatacatccatacgtctatgcattcagatgcataaggaaaaaaaaggattcaaactgaaacacctcatattcagctactcctttaccccggaacttgctgtagaatgcaaggctgcggtttgcgccagtggcgaatccttctatctcagtcttggtacccacttggcgttccaaagaagagggtttgatttcttcaacccttccgtacggagtacttaattagtgtcaactcgcaagaagtacagagtataaatgcataatacagttttcattcattaagctcgattgacattatattaacagctccgtagagcaaagagagacaaacatgatggtacccatcaagaacccgttccatattgtacctatacaagcccgacgacggcaacacatgaatcataacccataaagtaacatggagtacatgcggactctacgcattcacatgtgggacgtttacagagcgaggatagcgaccaggccgaggacgcccatagcaccactgccgacagtggccatgggggcagcggcaccggagctggatgtaggagcagcagagccggaatccgagccagaggtagactcagagctgccggaatcggagtcggaggtagactcagagctgtcggagccgccagtggaggtggaagaggtgctggtgctaaccttggtcaccatggagccggaggcgtcggtgctctagagatatggtcagtgtggttttcaagaagaagatcaagtgtatcttacagtgatggtggaaacggagccagtgttggaggcagaggcctcagtgccagtcaatgtagcggtggtcttggagccagaggcatcagtgctagtcacggtagcggtggtcgcggagccagagacgtcagtgccaatcacggtgctggtaatcgcagaaccagaggcatcagtgctggtcacgacagcgacgccagtggttgtggagccagaggcatcagtgccggtcacgacagcgacgccggtggtcgtagagccagaggcatcagtgccggtcacggtagcatcggagccagaggttccagtgccaatcacggtctcggtggtcatggagccagaggcatcagtgcgggtcacgacagcgacgccagtggttgtggagccagaggcatcagtgccggtcacggtagcaccagagccagtagaagtggagtcaccaccagcaccggaggtagatccagaggtagagctggagtcagagccggaggtagagctagagtcagagctggagctggaggtggagtcagatcccgcgacaccgcctgcgatataatgttagtttaccatatcaagtgttcgaactactaatagtcacgtaccagggcacttagcgacggccatagcgagaaccgtctcggcgtcgtcgttggggcaggcctccttggtgcagtcacggataccgtacttgtagttatcgctcttgcacaggcaagcgaggtcaccggacttgcaacccaactcggaggccaggttgctcatgttgttgagacacatagtctagagtcgataaggattagcattgagtatgattcaacacgggattaatcgaacttacagcacactccgaggcagcagactcggcggcgaccatgccaaaagcggccatcaaggccagagcaacgggggagaaggacttcatgattaagaattaggggaggaattgaggattctcgaggtcaatgtgtaagggacgaggaattggcaaaagtggaaattgaaagaaatctgcagatggggaccttttataaagacaggcctgagaaacaaaaacaaagtctgcatcaacctcaccagccacctgccccagactataaattgagtctccatatttgacaaaagaggaataaagtggacggagcaaacggtaaagcccaatcaccatagcggtgtggattgcctggcaaggccaagttgggattgttctgcgacccaacgtggcgatgagagaatgaatcgattgcttaagcgatatgaagtcatcacaacatccgaatcctggatttgccctctgtagtggcctgaaatggggtgatcgccccggggatagctcacacctcttctccatcgtcgatctcataggtccatctaatttgccaggggccccgttcggaattgaattttggcttttggcttttccacgatgttctccattattggagccagccctcccattttgccgataggggaatccgtttggctggcatcattaggggtaaccaagattttgatggtggttgagcttccaagctttctttcctctctgtgttcaccgatttgagcaatgtttatggtcaagataggcgaagatcgacgggtcccaatcggagctgaggccggcactaaactggattgtcgaatagtcagagacaccccgatcgcactattgaaaatttgaaaactcagttgttgggacaccgctattttgtggctgaaccttgggacacagccacactatcaatatcaccatgccatggactcgacgctattccggactctaggctctacggacttattacggactactattatgtattccccgatcctgaattgtagacggaggtcggactataaactacccccgttctgtatacacagggttgattcccaagcttgtttcagctttcaagggatacccctggaaagaaactggcagctttgagatacgtaagaattgaattgaaatcatttgactcgcatcgtctccttcctttttttcttcaaactagtaaaatattccgcagatcggaatcaaacatccaccttggatgcgagatactacggactccacatgaagataatgcatggagatttacggagtatgtgctccgtacagaccttatatagagtacggaataataaattaaattgattaagctaggtacatagcactatccgtacaataataatatcaattgccactttactttgacacatccctaacccccaaggtttataccaggtttgacggcgtccggtgttatgaccatgtgctaatcttctatttcctgattgcactgttgacatttgaatatagtctagggctacgcgccaagcaagctgatatctagcaagtgcggctgtgcggagaactccgtacagcatgttcccgctattgtatgagcccacatcgactgaagctcccattcgtgcagacgtcaacatcgtgggaacctgcatagattcaccttggcaaatttgagacaccgctatctctgactttgtatgccccaaggctgctatcgctaactctcacaatgctgaggttcagtatctctactctactccgtactccgtactctagctatagttaggattgactggtaaagtccaacattgttagtaatattgacgttacatcgagtccaacgctacggagtactgcctggcttatctggacttccccgcttcgaaatcctccaacttctaaccttctaaacctccgcgacctagagagttccagttatcttaaaactcggctcggttcattaaaatggttctcagaagttcaaattcgccattgacctccgagttcgatgccttggtacagcagcagatggacaaatggaaagtccccggactctccatggctgtcgttcatggctccagcacctggtcaaaagtatgaagacatagtgcactttattattgcagaccactaaaccacttttaggcgtatggattcgccgagtttcctgatcgcaagatgaccaccgattctctcttctctacttgtagcaccactaaggcattcaccgcagcggccatgtctctcgccatcgacgatagaaaggataccaaattcccccttcgctgggataccccaatttcgtccatactgagagatgattttgtgctggagaacgactacaacacaatgcatactaccatagaagatgccttatcgcaccgctcagggctttcgactcacgacgcctgtttaaatttagtgcatccccagagatccctgcgcgaagctgttcgcaacttgcgacatcttcctatagcctatgcgccccgcactaccttttcctacaacaataacatgtatatggtggtatcccatgcattggaacaaattgaaggccgaactctcggcgagactctcaagaaacgtatttgggatccattaggaatgaacgacacatacttctccgtcacagatgtctcgaaggacccatctcttcgtcctcgactcgtacgaggctacacctgggacccagacaccaacacctacatcgcagaaccatacatgaacgacgtcgctgtgactggagccggcgccatggtgagcagcgtactcgaatacaccaagtggctgcgcgcgatgatttaccaagagggtcccatctcctcacagggccacgcagaactcctgaagccacgtacggtgatcacaaattgggatgagatcgtcgcacctcctgcggtcccatgccatctctatgccttgggatggtttgtgagtagttaccgcggtgagccgttctactggcacagcgggagctggcccggattcggcatcatggtgggcttcctaccgagcaagggctttggctttgctatgatgggtaatacgacgaatgcccgaaatgcgcaggtggagatctacatgcaccttctagatcagatttccggaggatcgcggatcccacacccagtggcagtgggccaggcgacagaactgggaaataggacgctcaaagccaagtccgagtgtgtggacgaagccatcaaacggctttacccgtctctgcctgatcctgtcattccccattctttacagttgaaccaatatacggggacatacgagcatcctgcgtgcagttctatcactctatccgtgcgaaatgggtgtttggttgcagatctacttgaccgtgctattccttcccttatcactctcgtccatgcaagcggggagttctttgtggcgcatcactaccagcctaggacaattggatctctctccggttactacgctacggaattcatagtgggttctaatggaattgctatggcgatgggcctggatgtggagccagctttgaatggagagaagatgtggtttgatcgcgagtactgattctcagttatataaatcggcattgtatatatatttgatatccgtcgccatccgcttgaattgataattgaaaaactcaccccctctgtcaaattagacctacatacatacagatgtagttgctactccgtatgtaaatcgaagcttattaccaaacccatgacactgactggatgccaggatacgaaaaatacagatgcctagcggcccgaaatggccattcggcgatgccgaaccggctcgggctcggtcaagtggagtctcaaaaatttcatctggcagaccagacgagcaaaaagttactgaccgacgcagggatcgaacctgcaatctcttgattcgtagtcaagcgccttgccattgggccagccggccatatgataatttggctaaaatgtgcgctatagggtgcggctcggtcaaggatgatttgaaatttgaaattaggtaccttttgtatggtatactcatacaaagggtactttattataaagttcaagggttgttaagtatatcaaacaaaaggtacctaattttgtaatttatcgttcagtgaagatggcgccaacacacggtatgtgttggggcgcttggcacgatcatcggagagattggatatatactcatttccaggcgtgtgtaatagagtcatatatacacatcagtaacgggatatacataaggaccaagaacagtagggtatgtaaatgcaagaaaacgccgtgaagaagccaaaataagatgccggttagaccgagtcattcgactctgactcggcagtgtccgccacgtaaacatgcagcaacatggaggccttttccgaaaccgtgccttcttcttctgagacaatccgggatcggtagcctagtaccctctgccatccaaggcacacccccaatgaggccagcagctgtccgatgaagaacccaaccaaacaagccaccaacccggcgacgacacctagcaaagcaggaacgacgatgggacggatgatgcgcataaaggagttcttgtgatggcggtagtgaggatgacggtgttcagcgtggcggtggaggttagcgggagtggcccagaacgaaaagaaatgagtctccggtgccgagcgggtttcattctcattgctgctaacctggatagcatcgggttgagcgggagattccatcgggggtgccgccgtggtttccgcggtcttgggcttatcgaagacggagccgaattgtgtcctccagtaattgatcacccagggctggctcttctcgtatagatgaccatcttgatcgctgccacgggctggttcgacacggatgcgggtcatctcgtacttgtcactttggtaagcaaggaggtcgacggctacagcgtcaggtgacaccaggttgttctgcagatcgaaccactcgactcgcacacggatcatgtccgcgatggatgccatgtcgttgttctggagtggctcgacgtcgagcgtgtaggacaattccacggtattgtcactagggtcgatttggtctgcgctgccatagaggggcgcattgagctgcattatcactgatgggggatagagttggtggtcattggcatataggcttccattctgaatgctcaaatttatagactgtatcatattaggattgaattaattgggtcaaaacagaaatatttatcacgcacgagtcttgatctgacgcaattttcgaggtcgtcggtggagggagcgaaagggagtcggagttgatgagaactggggacggcagaggcgagggcactgcccagagagagcattacccaaagcagctgcataatgagcagtgtaggatattgaagtaaataaagtcaatgacgtgcgatagagggaggggagaagaagagaaagaaagaaaaagagagacagcaaggcttataatgtacggagtaaacccttcgtactaaggttcggtccaatacaccttataaagaggaaaagcttagcgttggtctcagactattcttagtgtgtgtgtctcaactcgggaaatgccaatgtctcatccttcgcaagtgtaaccctagcacgctcacattaatatgtattacaacatcgatttgaacagctcgttcaattctctgctgcctaggaactatcgtgtactccaatggtatccacccaggccaatcccaccgaaccgacaccttgcccggatttaatttatcgtacggggtccgcggagagcgaactctgttcgacagatcgacggattcaagacagaatagttagttgcgggatcccaatgtagtaagtgatcgagtgatcgagtgctcaagaaatggccgacacagtcagcgtgtctgatgtcagattgaagaggcattcaccattggaccctgtgaatccaccttgttggcctgggagaaaaatgacattgaagaccatgaatcttggcgaactaagaaactgcaattaatacgagtacaaggagataccgacttgtatgatttctgtgtgttcgttggttcgtttgtcctgacttaccaatggatatcccacgtgggtggaggaatctcagattaattatctcgaattacctccaactctcgcaattctacacttccatttccaccaattgaaccggcttatttacacatcctatgtacagcatccatcgtgtctatattgcatcacacactcaggtcgcctggtaataaggcgcagtctgccagaaccggcagcgtgggttgttggtcaggtcccgcgtcgcctggatgctattattgccaatgttcatgagctgtgcatactggccatgctttcggaacaccggtgccagatgagacttgggcacgccatgctggacaaagctggtgaaataatcctgcatagccaacgccacggtcgcgttggtgactcccaggagcgaagagctggtcttattgtcgtagaacgtgtatgagacatcctgtccgtgcagcgcgggcgggatgctgaactcatacgcataggtctgattgtagaacgcgcggttgatataatcggtattgcactggaagatgaggtcggagatgacgagcgccgtgcgcgcgaccgagtcggtgtacccataagacccgttatagaccggtgggtagaggacattatagacaaagtcggacacgtttttgggagtgttcggtgacaaggtcttcatttgagtggccagaccggtgctcttgacgctgtccggcgaagtaaaggccaacccctcgtctgcgttatggccgaccatgatattcaagttggggtcgaaatcgcctcggagcaaaagctgccccggcagagcaggaacgaagctgccgtccacaacgggaccgtaggtgaactgtccccactgggacttggtcgcgacctggtacgcattggccgcgatcaatttggccgaaggcaatttccgggcttgctcaaccgtgctgacattgagaattcctaggaactgttgcagcgtggcttcttgctcctcttcgccaatgactgggacccagcctgggctctgcatgatcgcttgttggaagggtgcagcgccgcgggtgcctccatacgcggtgatctgatgaaggattgatcctgcgccggcagactctcccataactgtgactcgggttgcatctccaccgaacaggtgaatgttcttatacacccagtcaagagcaaatcgttgatcgtgcagcgctgcattggccgtgccattggctgtgatactgtcaccaccaagccagccaaatgcacccaactaagaaattagtattttcacgacagcgacggaaaatgtgtcgttgacttactcgataattcaaggcaacataaacaaccccatcattgtttccctgctgacttcgctggatcaatccggtggggtcggagctgctcttttctccccccacatagcctccaccatagatccacaccagcaccggcgccaagttctttcggaatgctgcggcttcacctttgctgcgttcgaagatcttcttaggcacaatcacatcgaggaataaacagtcctcagtagtgcgtgggtcttgcttcgccggtttgtactcgtaggaagagatgttggtggatagagggaaggatgtattatagaagtagctcaagaggaaggcttcttcggcagttgtcgaccacaacggggctgcctggggacagatctttcccacagagccattctgaatgtgatctctgttttgtttgggaagtacaggcgcctggaatcgcaactcgccaaccgggggtgcggcataacggatgttgctgaagttgtagaggccatgggagttctacttatgtcaggggtaatcaagatcaagctaaagaagagtcaactaacattgaatgagattgcttggtgcagctcatatcccagatcaactacagggagcttggaggccagacaagccgaagccagcgtcaacaacaacacagcgaccatattgacccctgcagagcagaacaaaaacacagggaaaagaggaccactggagcttccaggtttatattaatactagccagaaatcccgaatttatcccggtacaaagtaatctatgttgtatttcatccctacgtccgagtggagaactccgtacggagtatatgattgtccaacagagaacgagatcgacctcgtcatcgcagcttagtcagaggggaaatcggtcctttctatccgattaatatgggcgatgatgtcaaagcgagacattgcttctaacacaccaataagagatgagatcacactgcgctaaatccgggctgagctgcgccatccaggaaattgttggcaccgacttgcggggtactccgggaactacaacataaaaacgcctcgtcagatggagcacgcgatcaattgcctagaacggtgttcatttgttctacggtgaatcatcgacctcgcgaaccttatactcgaacatctggttagagggcacttcatgctcgttctggagtttcgcggcactctcggcgcccgcggctggcacacggtattcgaatcgtttcccacatgctggcacagatccgtcgggcagtgcatatggaaaaggcagatattcgggtaacagacccagttgcacaagtactgttgcctggtcccatgaaatgtgctcatgaaacaagcgatctccgcggatgttgactacagatgtgaatggaacgcggacatattttcccgtaggagggatcccggggattctaggcagatgtcaattaattgctcagctgagccacaggaaccaatcacccacatccagtccatctgcttcacatgagtgaacacaaagataaattcgtccacaattcggtccgtgcctactgtccgactaataagctccaaagctgtgtcgtcggggttgttaaagatgaaatgattgagataaaaatggcttaaacgagctcgtccaatgcctcctgtcagcgttggcacatgattcacgtaaggctctgagaccatcgtcgccattgtcttttcgaccgagcgtgcttcgaattcataataggtgtgctcgtcccagatcttctcgaggtcaaagaacgggccacccgtgtgttttttgacaaatccgacaacccgcgtatgagctactcctgctgtcgatatgttgaaatccggatggcctgggatcatgaagctaggagagcatacatcggagtatatgtgtatagtctgtccttccttcttctcgacttccattggaccagatagctggaaaatggttgactgaaagaagggaatgtgccaagagtcgaagaataccgcggcgatcagagccgtgccttgaaccagtgcaccttggagactttcctcgaattgaggagcataatctttctttgatccataaactggtttgtgtcagtggaggctagtgaaagggccgggttgacacttcgtacctatcaacccaaccttttccttcgtatcacactcgggcctctctgctaagccacactcagcttcttgaagaagctcccgcagagatgatatgttaatagcagacttttcgtccacagtaatctgtgccactgtaaagctttcctccgcccattttttgaggggttctggatcaagcgtcttgttctgctgctggcatgtcgcgtaacaaagaggtcgtatgagaaccagtcctggaccgtgtccacagcgggaaagaggaggatgaatggtcacatatggactcaagtccactggagcggaagataaacttgactcggtcatttcgcactcagaagttggaagttgagcaaatgggggtctccaagtggccggccgatcgttatatgtaccggcctgtcacccccactagtgaggataaggatacaaatcagctatgcaagagatacgctctcaatacgcttgatcggtcagatactcatcatgtaattttgcaatcatcgcatttatctcagagctactatccacgtgacctgtcatcctcggcccgttcatttctacgcgcaagctgtcgctctcccaagagcacaacccaacaatgaacgcacttgttcagtctgcgctgactgatgttgaatctaaactcaatgttcttctgaccagccttacaacctctcccactgctgcaggagcccccgcagcagctatcgccctgctcgatgcggacgatgcgctaacctgcaccattgaaacgcttcgacagcaccaagaaaaccacgcgaatatccttcgactgcgaaacgaggcacaacaattggaggaccgagtcaagggtatcgtgggggatattgaaagcttcgagaaagagatccggactgcttgtggagacaacggcgacagcgacagcgatttcgattccgacgacgacgacgaccttggcggaaagaaatcattactacggggaatcaaggagattgactacaggttactcttggatttcgcacgtcgcatcagcaaatacaaccacgaagcagcagccgatgcagcaacaggcgttgtgaaacgtcaggaacaaggaaatactcccgccgacaaagatgtgacaatgacgggaacaaatggagaacaaccaacagaggaggacgcagagccagtggcatctgtcactaaaaacgcaacgcagtggttggacgagtccgccaatgttacgcgccaggtctacatgctgccctacccgatggaggaacggatacggatgggattaatgggtcaaatccagctttctgctggtgacgatcccgaaaaggaggtggaacggttattgcgcgaagctgaaggtcttggggctgcagaacccccggcacctgtggaacccgccgaaagcacaaagcaggcgggcgaggctgcgaaggctgcagctcaggccggatcatcagctactggaatgccgcgggcgcatgccccagcaccagcaccgaaaccaaagcccaaggcgatgctggaccttgatctctacgaccccgacgaagatgacgattgagtgttttaaagcgggcgttgcattcgattttcataatgataccagctaaacagcaaaaagccattcaaactttttatttttattttttttagccgtgtctcattccacattttgtctgcctcggggcgtttgatccagcttacgagccgaagacttggccgtccatcccccggaatctcttattgcgcagcgaagcgaagcaattaaatcataaactcgtgtagttgttacgtggcggttgtttccccttcgaggacagtctgcaaggtgcactagttcataccataatgagtaactagcactcgtattgaaaagagagtgccaagaaaagatcttacctaattaggttagaccactgtgccaacagtaaaatcgcttcagttctccgattctaaattgatctcactctacaatctattcccatttttgatttcccttgacccaattagacgacaaaagatactcccacaagatataaaaaattagtagtactagtttagttcctacatctacaaggccgaggaaaagaacctgccctggtcaatcgaaagtagtaaaccatggagaaaatttgatgttgaatatcagatcttttcttattttcatagtcgtccatgattactgttgagcaaggcattcaagttgatcggttatcccgtgaaagaagcacactggcactactgtaatatgaattatctatctccatctctctgaagataggagactcgcaatacgagtaaggctacaacggttttgacgatgaatttaacgtgattcccgagtgcaagctacaagttctctgatattatactagaggatcatggtctccttcaatgtacgtcacactttgtggctcatatgcactggtcattcagtattcataaaaaatcttccagatcccaaatgagtttagtagtgtgggtgccatggctttggtatctatattagtcctcggcggtggataggcaagtttattctgaactcaaagggtcctctactcttttcaaagtataagactagaatagttccttccaacaagagattctctgttctctttaccagaccagattttctaagaactgttttattatctccgacaatgtctaaattacctaacaatagtcctccgcaatacgaatcacaccatcaaagccaagataatatacttatcactgtcattcagaatgaaagatgcttccgggaatgggcgcgaaaattgcgggatcttgatcctagattcgagaagttcttcgatagctcatttcaaggcgacttgagatgcccaaaatgtttggagtatgtacttcaagggggccgactacttgatgaaatgacagacttattcagagaggctacgaacatactccaggaaagaacatcacacggccagaatgagctctatgatgccataaaaaagctttctgataccgagcttgatcgcgtctttgcttcttcaaagttgggcacaacatcgcataggcaacctaagctgacttggaaccacaaaaacaatatagacggccatgggaacttcaaatacaagtcatcgagggcacggatgtttttccacgctatccagggggtatgggaacatctcaagggcccgctagtctgagactcttgggatcgacagcttcctgcgagtcgcttttgtttctctaggatggtcctgacggggcattataaagaggagaaaatagcatattggtgtttgcttctgtgatatgttttatgtttctttataccaataccaaacctttacactttggtatatatttcaccgtattctacaatagcgagaaagaggtttgacgttgttcattacccttgctgaattgctagtaatataatccatcggatatgaagtagttgcaatcttgactaagtccttgatatcttactaggcaccgtatatgctacttatcatgccacaaatgtaaatgactacaagactcacctttcatgtaaatacagaacctaccttcgagataagaaacgtttacagcgaacggtgagatctacggattagcacgagaagaaaagccacgcaagcacacatagcaaggatgcgatatataatgaaataagaatacagaagaaaaaaaaaaaaacaaggagcaaaataagaatacaagaaaaactaaagatacaaacaaagtacacaaaaaaactttgtttgtcacatatcctgttttcccttcatctcacctcgctggggttctcggggagaagcaaaactggtgaaacgcccagaggaacgccttggtgccagaggggctcgctcccacccgaattagcgcttgacccagcgttcaaggccccgggcagcacggccagattgctggacggtggtaacagtggcctaggcttcggcggccagggggcgagacagagaagggcccaacggagtgggcctgcagaatttgctatcacaatagctttcatgtcagtaccaatactatctccgcccggactatctcccgccaacgcctgcgctggtgatcagttcgagcttatcgagtgacgaagccttctccaaaaaatctgagaagggcgattgcaggagagcctcatgacgatcctgagaagaaggcctattcatgttcgcagtcgcgatctttggtgtaaggatgaagtgggagatattatgacataagagcgcgggcggaggggatcactagttaactaggctagttagttggttactcgagcagtttctcaagtggttgctcaagtagttactaaagtagttgacgataaagcagttaatattcatatgacaaaagggacttgattttatcagtggtttacatacaaattataggtacctactgccatactactaccatatggcaggaaatatgcctaattgtgaacgcggtactgaaattacaggcagggggagaataagccagtaagagggggcctttgcgtagcattaaaagttggaatcagtcgcttcgctctgcaacgacaatctagagaccttgggccgtcaagattactagtaattagtcgatatgccactgtctatcccgtcggaggattagacctgttaattccagaggacaagttttgtgtcactggtggctccaccgcagaatatactttggcaggcagggttgcctcttcagtctatagtttgacaaataaccgcttttcagtatctaaggtggcttcgtgagccattagaattcaggctaaggacagaacagggctaggaattgctgataattattgatataaaatcaagcatgcaaggtagttcatgtgcaaggcgattttgatagtgaatagccactctattttctaaaatttacctttgccttatatactatcagaaaggcatatcatctcaataactcgctcgcatggctcagtggtagagcgcgtcactcgtagattcaatctggaaatgatgagatccccggttcaatcccgggtgtgagcatatttatttatttttttcgtcttcttcggacaatttgctttataaagccaaatgtgcaggagtttttcactaattagctcgcatggcttagtggtaaagcgcatgactagtactaagtctatcatgagatcctcggttcgactccgagtgtgagcattttttgcctttatttaatctccatctttacatcaaggattgcttcatataagcaaagttttaaaaggttttcattaatcagctcgcatggcttagtggtaaagcgcatgactagtatgaaaagctatcatgagatcctcggttcgactccgagtgtgagcattttttttgcctttgtttgagctttttgactgagtgttttgcggtttcgtgtgagctgctttcaacctttttgagttgtgctttccattatggtagtaggcttatatagacaaaggtgtgtaagttttccaccaatcagctcgcatggcttagtggtaaagcgcatgactagtatgaaaagctatcatgagatcctcggttcgactccgagtgtgagcattttttttgcctttgtttgagctttttgactgagtgttttgcggtttcgtgtgagctgctttcaacctttttgagttgtgctttccattatggtagtaggcttatatagacaaaggtgtgtaagttttccaccaatcagctcgcatggcttagtggtaaagcgcatgactagtatgaaaagctatcatgagatcctcggttcgactccgagtgtgagcattttttgctttttttttataaactccctagtggttgagaattgcggccagcggtggacatacctaaagtagctacagagtagcgagtgtcgatagaatgtgcccgtggtgccgtcctgctctcctcaccgcccttttgtcaaattcgcatgtacctaagcaagacggcaggtacctgcgctttgtatgtaaatcactgacaaatataagtcactattatcacctcttattctatctcaccaacgtcaactgaaaagagataggaatcaggcagatttcgcaatttgttactcaatttgttactacataaccaactaataaggcagaaaataataatacccgatcgcgaaggcgatactttaaatttagcgcttgccacggttaccgcgttatcaaacttatcacagtaggtacatgtacgaagacgtttttagcagtttctgaaacttgttctcctttttaagttaataactcttaatacttataattggtctaacttttccgagtcgaagtttaccatatgtatccgtcataagtgaatccctatcaaaaggttcttttgtatttccaggcttttaacaagaatggagttatataaacatatacacaaatatggaaaaggcttccaccaatcagctcgcatggcttagtggtaaagcgcatgactagtacgaagtctatcatgagatcctcggttcgactccgagtgtgagcatttttttttaactttttggcttgcgcagccttgaagcttttaaacacaaagtcagagagcaagagacgcatttacagcaggcgaacattactgggctatcgaatgtcgagagcggagattgatggatggatggccttaagaaaagaaaatccagtcaaacaggaccaataaaaggacagtcagggctaaatccgtgaaatagaactatacacaggcagagtgcatgacctagccagttctcctgcaacaagtgagcctagaggcgtaaatatgcatggtgacgaaactaatcgggacgcataagacagaccccggggctatgagtgtcttgtatttggggtgcattgaagtcccaggcttgagcactcgcgctctcaaccgccttctgtaggtggaccatgtgactatctatatgtagtagtgttttgagactatagatgcgtagctgaggccaccctgttactacaaactttctacctctctccacaaatctttatcccggcttcgccatcaaacttgtcccgttgttacacttattaggaatatgtagtagtaccgcaccggaggatgctccggaccagttcacctattatctctttcgcttcaaaaggctcaacttggacccaaacatgtctgcgtatgtcggattataattgcggcctgtcggctgggcccttatccttaatcccccacagtgtggaggaagaaatcgatgagcccaatgatgttcgatcgagtcatgatccccggatgtcacctccacaccacgaaacacgcgaacaaagcttggtcgagccagactgtgatagtcacccggaccaatcggaaacaacgatgctttacctatagagtcgatgtaatggaatcttggcacttatctggacaaccccaaaaagcatttaattaggctccggggtcccggtttatgcctggtgtccagaatggcggttctggtcattttgggttctattctgctcagagctcttgaattgcttttttcagatacatcactacaatgagtcactacgaacacccttccttcgatcaagatcagccagatggagatgtggagaagcaggatgacagtgatggagtctgttctgctgggggcactcgtaaggccagccgagcgcaagggagtgcaggtggacgggttagtggagatgaaagagatgagttaaaagaatgggagtgctacgacaagctagggtattccttttcctggtggaaaaaatggactatcatctccgtcatctttgctgtccaaacgtccatgaacttcaatgccagtttctatgccagcagcatcagtctgtacgcgacacacttcaatatctcagagcaggccgcacgtgttggtcagatgggatttctcgttgcttatgcatttggttgcgagttttgggcgcccttcagcgaagagtttggtcgatggccaataatgcagctcagcttgttcttcgtcaatatctggcagatcccctgcgctctggcccctaatttcggcactattgttatctgccgcattctcgggggtctatcctctgccggtggttctgtaactctcgggatggtagcagatatgtgggagccaggtgaccaacaatatgccgtggccttcattgtgctatcatccgtgacaggctcggtcattgccccagtcgtcggaggctttgtggcaaccttccttgactggcattggaatttctggatccagctgatccttggaggcttcgtgcagatattgcacttcttcgttccagagaccaggtgcagcatcctcgtcaccagagaggctaggcgaagacggaaagatggggatatggtatggagtggtgacgagctgaagcaaactcgtatgtccttccgctgggtcttcatggtttgggtccgcccatttattatgttcgcgcgggagcctatcgtcttgttcctctctctcctcagcggtttcagcgattctctcatcttcactttcctccaatcgtatacgccggtatacaagcaatggcacttcaatacgattacaactggacttgctttcctcccgtgagtacccacaaccttgaatttagactaattctgataatctgatcatacagacttttggtgggctatctcattgcctatgtttcattcattccatggatttatcgggattgtaagaaacgagagagagacccagatgctcttcagccagaagctcgtctttattggttgctatatggtacgtattctcaaatctggttcattggtctcatcactcactcgtaacagtggctcctctgttgacaattggtctatttggatttgcgtggactagtctcggtccacctcatgtccattggattgcgcctatgatcttctcagccttgatagccattgctaatgtaagtcatgaaaactcttaccccacgatacaagactgacaagttattctgtgatcaagtatgctatttacatggccacaattgactacatgattgcctcgtatggtccatatgctgcctcagccacgggagggaatggaatggcgcgtgatttcctggctggtattgcagcgatgtattcagtgcccagtaagtgaccataattcctacaacggaatatccactgaccacaaatacagtgtatacaaacatgggtacaacgcatcaccttgaatggccttctactttcttgggcttcatggcaattctcttcaccattccaatatacgtgttctattgggaaggtcctaggattcgagatatgtcaccattcgcgcagaccttggcttctgacagaaagaaggctggccgcagggtttcttcttgtggttccggtgatccagatcccgttgaaaggtatctgtctgaacggtcatcacaagcgaccagaaccagatccggttgaaaggtatctgacatgttcctcgaaataattctatgtctctagcttgctgtggtttgggctgagatttgcatcagaacggcggaaagaaagagtatgaaatcactgacacaggatataattggtttcattgatttctatcttaaaagcttctctttggtgacatttttcgtgctgatcttcgtttctgttgcgttggccttcatcactgcactgctaaactgggaaatatttttgtattatttttgttttgatataatgttacaatggactttattctgggatatacttgctgtcgcacacttacgcttgatgcaagaatgccatcatcccatcatgccctagagtaggggcgattaagtatgtcaccagggcataaatttctcattggatataagccagcgtaattagtatggtatccttagtatattactgcacttcaaaattactacctggcaacattaactagtgagagggttatggcttatgactgcccaatggcatatagtcgcccgtactagagtcatgtcatagctaattcggaaataattcccgatgcagcaccagcagcgatatttactttgtccacaagggtgtttgaaattaaatatagggtatagacgtttagatacagtacagttgatggctcgcaatgtagaaacggaaatcaagtaaaatcattgattccaagaatcctggagttttcgaatggcatattcagtagtccaacccaaatcagcttcgacgccccgtagcagatcaacaataatctgatgttcctcgggattttcaagacactgcccgacagcgacgagaagcgggaccatgaatatgcgaactccaccctgggggcgacccaatgcaatgccgctgacttcacgggcacggaattcgacctctttcgtgacctcccggtacccttgtaagcggtcaaaggctgtggacggtgcactgatcacatctgccggacgattgagcaataatgcgatgcgcccgaaatggtaatgttgcatggcaacagcacaggttgtcaagccatggaatatttcagggaacgacaagtaactcccttcggcagtctttgataaatccttggggcgttcgatccgcacagaagaacggaacgtttctggcacattttcaaaccatgtttgaaattcgaaagatattttgagccaggtatctgtgtccggatacggcagttgggtggcgtttgttgttgtgccttcgggtgaggctgccggcggagatcctgtccactgcgcaagctgtaattgtttagacctggcgaggaagttgatgactttcgtgacaagccagattaacccgttagcagcctgatcttcctgcgatagagttgacccgttccggataatatggaaggatttctggtcgttgattgaaattcctgctgcccgccagaggggcaggttctctgggtcgaaatgtgtaggtgagcgggtaaaataagaaccgagatagtcttggcgggcgaaattccagaaggcagcccgaataccatgagaaaacagggcggatgatgccgaatgtaaactgagaagtgactcaaacaaagggccaatgcgagcaagttgcctggggtctaatgttagtaatagaacagcaactgctaacaagcatctcttacatgtgccattcgtccccgggcatatctaaaagcctatacatggtaagaagcgtagcagacgccaacagctcctctgtctttcgaatgatcgccatgtcgtttggatcttcactcgcgggcttcatggtcgcttgagtctgacgggagctgatccatcgaccaacgatctcaaagggggattccaagatggctgagctagacacagtggtatagccatcggacgtgaggttattcagatccgaagctcctaggtaatagtaattggcagctttgaggaaccagtcaacttgagttgcgtttggataagtttctgtagtcgcagggctcgtgaacattccacccgtggaagccttgacccctttcaagcgagctaggtgtttggctgctagcgctgcaatagcgtacttcacggacagattgctgatggctcgaataggaacatgaacggtaaagaatttttgagaatcggacaaatctagcctattgtattatcaatacgctgcacacgccaagggaaatgtcagtaatacgaaccatggacctatgacctccgagtaatgtcgagtgaggaacgcgatctcgtgttcagttccagtcatgagctccgagaaaatatcctggaattcatctttttcacttcgatgtgatgagctttcggagatgaccctttggtaatcggggcccttatgtggaattggggtgtaggtgttatcaaatgttgggaaacctcctgcggccgcagttggtgagattgacttatatattgtgtttcttgaagattcgctgccttcctcgatgccagagatggagttgtgaatagagatagctgggctttctggggcatgcattgttgtttgctggatactccccatagcaacctctgggcggttagaaggaccaggcatttctactatcatggagtcatctctcgagtccatctgaaaatgaagagccggattatcttgctcctgaggttggttccattgcaaggtctgctcattaggtcctacttgtgagctttttggctgtgtcgggtctgatatcagctctgcggggacgtatcacaaagcatgagtgcttaggcagttggcagtttgacctactttgtttgaattgaatgcagagtttggccttgaatgaggctcctgatatggagcatagcggcgccttactgtggctccctgatcgatgaatttgcgggtctgaacataccccgggcattctacccccgcggtggtgcaccgctgacaatgagggcgagtctcatcacactgccccaagttagcgaaaatctgcacatccaagttcaagaagtcgaactaactttgagatgcctctttttgcaacgctcgcatgccttgttagatggcaccccaggcattgtgggttgcgtgccagtatcgcgatttccagggcttaatgctcagttttcgaggtcatgggagaagctctgcgttgcgtcgttataacacatacagctacttcacatttcgaaaatacatcaggcgaggacgcaatcccagggcaacaaatctagaatgaatgatgcaaggtgcggccaaggcccgcgggctgaaggggggatgacataatatcccgggaatttctcgcttggaactcggaatttggcgacctttttcccttgtacatcctgtcgtcacttgcttcttttctacaaaaaaatcatacaccatgttgcgaacaccgtcaattctcgttgatagacaatatgacacatcttccccattgatccggtatattgaaggccacgatcggatacgttggggctcaatatcttcaacacagccggttctttcaggaccagaacaaatccgcgtatatcgcgaatggattggtgtgtcaccatatcaaattgactagtgaatctggtaactaattctgcagatgctgggagacctcataatatagtatgttgggagtgccgtctccccgacagtctgattggttgccagacctgctgtaggtcctaccatacagcatgtttaatggatgtggttcgctctgcaaataacttccattgtccatcttgccgggcaagagcttgggatcgtacaccacctcagttccccgtgccatctccaaccccaagcactggagggaccccaaacagccattcagacacgtcatctgtaaacatttcaattcgtcgcgatagatcgccaacagcatcacggggtaaatcctcaacggcctcggggatgatgcatccccctactttgaaccgtattgatgaagtcaatgctcgcggtacgccaactgaggtatatcctattgcagagatgtaccctcggcttctggaatatctagcgttaccagatgctgagacagatcgccatgcccaatcgtcacagttcaagcatcaactgggaatggctatgaaagaaattgaatcatatcgggcatcgatgcgagacaagacgaacatccgagaggactattcacgattacagcgcgagaatgcacaaatcaaagcgtatcttgattccagggactcaccgcgagagtctagtattcccagcccttcgacagttccacacagcatcatctcaaaaccggtgtctgaacaaagggtgaaggcttgggacagccttgctattgacatgttttgactgttcgtgtctggctgcacgaagcattttgacgtatactcaacgaggaagttgaagtagtgatgaagagttacaactgcagcaaaagaacaagcattgaatgtcctgaaccctcgattcacccaacacgatcactttcaatggtctcgatatttgccgaacatcttttttcgacgttctagatgcatgttggaaaccgtgcatttcgccgaaaagttcccgaccggtcgtaatttgatcatgtcaccgtcacgctctccatttttgatataatggcgcggagaaggttacatgaagtgaaattgctctcgaaatggacgaatcaacctctggagagactgcgttccccgcatctcggggcaattggcgtcccctcaacctcaacgatcgacaagtcaggaacccggtcattgtggaactcggtcattatcaagtttcttattggatttttcaaccgtcttctctccgtatcttcgggttttcgctccttgacctcttcccaggcggggaatgagcgtggcagggtgtattctgggaccagatacggcagatgtgacaccatttcggtcgagcgtcgatgcaacatccactggggaattgctcccgcatttcattttggcctaagtgcaaggaaccaaggaggtgactggcagtttcctaatttttcctcatttccctcgaagggtacttcgcatgccgatctggcccggaatgcttcccccgcgacttattgccaattcctataaggagcttgaattccgtggaacgcgtcttttctacgtctgaattgtaacctggacagcttttggattattcttgtgtatggctgtagatagtctctggatccattatgctatcacagcatcactccctccacatgtgcatcttcaatggcatcgtaacagccctatatgcatccaacgtgatcgccgcaaagcattcttcggatgactttgacgtcttgaaatatgtcgatcctttgattggcaccgcgaatggaggtttgtcttgaatatgacgagcatttttgtcagcaaaggctgacaattcttacaggccatgtatttgcgggtgcgactttgccatttggtaattcatacgataccctttgttttcatttaacatggctaacaaacgcaggtatggccaaagcggtggcggacactgcaggcgagaatcaagctggttttgcttacgatacggaggttgtgaccggattctcacacatgcatgattctgggactggtggtgtaagttttttgtagactctcggagaatatgccctgtatctgactgatttcacagtccccgtcaatgggaaatttccccatcttcgctcaaggaaattgcccgcatgacgatattaaccagtgcaaatggcaaaaatcggacagagcagctgtctgggacaaagagtctcctgaagttcgtccaggatacttcagcatatcattggcgaatggggtccatgcggaaatgacagccacaaatcgatctgctctatatcggttcacgttcaatgaaacctccagccagtcgctcagtccagtgattcttctggatttgatggatttacctcaatctcgaacaagtggaagtgccgacgtggacagatcgactgggcgtctcacgggaagtggcactttcagcccgagctttggtattggcagttacaagtcatatgtttgcgttgatttcaaaggagcagagcttcgtgatacaggcatctgggagaaaaaccaagcaaacatcagcagtcggtcgctgacactcgggtctgacacatcatccactctctcggctggtacatttgccagattccacgcccccaaagacagcagtattctcgctcgcgttggcgttagcttcataagtgttcaacaggcctgtgagaatgcggagcgagagctacccgactttgacttcgaaggtaccgtttccgctgctgaatctgcttggcgaaagaaattggatgtcgtctccgtggatgcagatggagttttaccagatttacaaacagtcttctggagtggagcataccgagcactcatcagcccgcaagactatactggcgagaaccctctttgggaaagtgacgagccatattatgacagctactattggtgagcaatccccgattcgaaacagatgactagcatgctaatgatacgcccagtatatgggattctttccgcagcattcatccactgctgaccctggttgatcctttctcacaatcccttatgatacgcagcttgatcgatacctatagacatgaagggtatctgcctgattgtcgcatgtcgctttgcaagggattcacacagggcgggtccaacgcagatgtggttatggcagatgcgtatcttaaaaaggttccaggcattgactgggacactgcatatgaagctgttgtcaaggatgcagaggtagagccccaaaattgggatgtggaaggccgcggtggcttgcggagttggaaaaatctcggctatattccttttgatgactatgaccctgatggcgaaggtacgcacacgcggagtatatcacggacggtggaatatgcctacaacgacttttgcattgccgagatggcacagggcatgggccaccagtccgactatgagaaatatacgaaacggtctggaaactgggtccacatgttcaaacccgaccaaaagtcaagcatcaagggggttgataccaacttcaccggattcctacaacctcgatacacgaacggcacatggcgctaccaggacccgatcttgtgtagtcctctcttagacttcaccggatgttacctcaatcccgatggccatgagacttatgaaggtagtgcgtggatgtataccttgtgggtgctcacttgtattttatacttcttgaactcgaaactaacgctttacttacagctatgccccccacgacatgggcgctcttatcaagacacttggcggtgccgaatccttcacctctcgactaagctatctccatgactctggtttgctctacgtgggagatgaacaagccttcctacccgtatatcaattccactactcgggacggccaggtctctcggcaaagcagagccatttctacattccatcccaattcaacacaacagtcaatggtatcgccggtaacgacgatagctccgctatcgtcgttaccggcgatagcggagctatgggatcatttgttgtcctgagcatgatgggcatctggccagtgccgggtcaggacgtttacctgatcactccgccctatttcaaagaagtcagcattcgaaacgccctcactggaaaggtcgcgactatccgcaacatcaatttcgatcctagttacaagtccatctatatccagagtgccaagtggaatgacaaaccgtggacaaagaattggattacccatgactttttcgctgagggtggtgttcttgaacttgagctgggacccaaggaaagtgaatggggaactcagattcaggatctcccgccgagtttgagcgattatcaatgaatagtcgatctgaggagcaactgtggtgagagagtggcatttcgagattgttggcctctctgataagcaggttacttttatcagtatattttatcagtatattcacgacttgacactatgaactatatctctttttgatgtcttttatactgctttttgaaagattttgatactatcattggaagactgtataaaccatactgcatcttcagcataactagtacttgtaaagtaagagtggatatgaaataatactacctggcaatgttgactaatgagagtcatacttagtcgtcatcgtaattcgctgaacctaaggcaaagtgtatcctccatcaataatgaggtttgcacctgtcatatagctagacgcatctgaagcgcagaacacgtaggcctagataagattgtcaattggtttctagggaactagatttgtggaatcgtacccccttcaactcataagattcggccattctcttggcggggatcaagtctagccacttgtcgcgccattctttggggaaggtgaacagaatttcggtagcgatgtatccaggggagatgcaattgactcggcagtagtcaacccactcgacagacaagcacttggcgagctgaacaactcctgccttagacgcattgtactatgcgaggattagcgacatgaaaaaggagtctttccaatagagaacataccgccgattgcttctgtggaagattgaccagagtcgcgctggcagaggccgtgaatataacatttccatgaccctgtgacttgaagatccggccggcagcttgggcagaatagaaagcaccatcaagattgaccttcatgatctcgtgccattgatcgggggtgtagtcttcggcggcagtgttcgaggcaatcccagagttgacgaccatgatatcaagcttcccgaaatccttcgcgacctgctgcacaaccgcctcgatctcagactggacggcaacattggctttatacgctgctgcgcgtacgttgttagtagatgcaatctcggatgcgactgcatcagcggcatcgaatgtgtaatagatcaaggcgacctttgcactttgttagtttgattgttttgtagcatcaggtactccgtagtgtgacttgcatttgcacccgcttcggccaacgctctcgagacttcaagaccaattccacgggcgcctcctgtaatgaagtgttattcgagagacctttataattgggagctaccgtaccagtcacaactgcgaccttgcccgtgaggtcgaatgccttcataacatgctggtttgggggttgtgcgagaaccattatgtcgtattggctgttgcccgcactcgagataataggataaactcaatcgaagattaacagagaagggaggagctgagtctgaaatgtccctcttaatccccgcatctgttcagctctgacgtgtctccaaccattgtggcttcctcctgcagctaaatccagtctaaccctgttgaaggtaattcctggcgaaagcgactagacgctgatgattggaacgccctgtctcactcgatgtccactgagacttttatttttttcgatgttttcggttgttggttcactttctcgttgttctgatttgaaccgtttgcacagctgggtgacgtggttgggtgagaggcattgagatgtcgattcagtttcttgagtcccttgaacaactgcttgttctctctgttgagctcataagcccagaggagagtgagggcttcgtttgactttgtattttccattgtcgaagatggggctcggagaggtggagaggaagagaaggggagctgaggactaagaaagggaaaaggaacaaagacactagaacttcctagaagaatacaaagccatcgattaattaattattattcttctagtgaatttactgacttcaaataattaggtctctactttatctccatttcatagagtatagcaaaaaaaaagaggtgctagacttcatgtgctttgtatctgatcaaatatcaagaagacaccgaatgctcaaagatgttgttcggtttctctccttaatcactcatcgtgtcacattcgtcctcggaatcgacttcggtctgcttggtctgagccttgcagtcatcatccttgtccttgatcgctcgagtatcgtcatcactcctggtggaagcttccatttcatcaagcttctttctcaggcgatctagtctcattctagcagcatggttcgtgatgccaaagtgtctagcgacggctggggcatcaacctgtaagttgatattgttagaattcatggccagatgttcaagtgaggccgaacaaaagaaaataccaacctgaacacctgagatcttatggcaggcccacaggaacaagagctgctttttcaaatcggaatctctaggttcctttggcttggatgggctttttccagcctttgaggctggggttgatttagttggagccatttgaaagtgtaataaccaggtatgagctctttgagtgtgataagtgaagttgtgggagaatagataatagtagtgaagtcgagaatgaacaaggagaggaagtgagagagagatcgagtaggaacctttatattggcatcaatagcaaacaactaagaaagcatgtctctctcaacttacatggataagtacaaacagaaggaaagtacatttagacactttgatcctctataatatatacattattctatcaaattggggtatatgaccataaaaacagaaaaagtcatttgaaaacgctcaggtgaagaatcaaatgccctttgtctttatagactcgaggttcttgactggatgtagaaagataggaggaaggcagagtcgagggttgttcttctcccactgcacacgattagtatcagaatatgtcaagacaagagcaagaactcacctctttggcaccgtcatagcccaaccaggctctgtatagcttctccgaaaactcggagttgaacataaacgtcgtattgtatataatattatcgtgctgaccccagctccagatgctgtcgagcccagcgttgaccttgccaggttctcccgggttgacatgacggttcaactcctcaggatcccatttggcatcatggtaaatcggttgaggaatctggaccgctttcaagccatagtacagagcccaggatataggagacatctcggacgcgagaccaaccccggacttcaccttatccttatgcaacatgccgagaagtcgcgccgagatgcgagacattgctacaacagcggcccagcgtggggtctcttggtcttgagggaaattgaagacacggtcacggaaaggccagtctgtaccaactgggttgaaatgaggcagccaggtgatcagatcggcttcctcacccacaccccagctccctggctcatcttttgggtatggtacaggggggataatagcttgcccttcgatgtcgattccttccgcgggatgagggccccaaacactgctgttgtcatggccaggcatttcctgatccaccttcttcacaaactcttcccaggtgccatgaacagcaggcatatagaagtgagagttgcgctcccacagatacttgcgtggctgctgtttcgcaaactctgttgccttgtgcaaaaggtcgtacatatggccggtataccgcgagtccatctcgaactgccacacgtagtcatactgagggtgtagtcgtgagaagatctgtgtgggctggaaatactgcagtatagctctaatagggtgtcagtaggggcatgtctagctctgaagggccaacacatacacatgaacatcaatcccaggataccagtcattcaacatttcctcgttaaaccataccgccaggctgcgcagttcctgcggcaaatgttttgccttgaatgccttccaggcggcataatcggtctcttcgggcaatttctcgccctggcagtcgatcaggagaataagctcatattctgcacctgagtagagtgacaactccatcagcatggatcgaatgtgatacaagtcattctcggtgtatttcatgccgatccaagagcgcaatatcacggctgtccgggggacggtcttgtctgtttcattcaggtcctcgcgaggctgcacatccgaatctaatgatttgtaaagagcgagtatcttcccttcggatggttgcgtgcgatagcgaatactattgcgctgcagacaatcattttgcaaattggcccagtccacctgctcccagtttatttcagcggcctcgttggaaccgaatgtaccattccaattgtgggttcgagtggtcttgccctcgaggaaaccatatgcaccatatcgggagtagcgatcggcgcagagactgttgttcaaattccacgactcatacgatccaaaagtgggagttgggaaatctatttgacgattagttccccgtcggctcttcaaatcttcctcttcgcacctgaagtattccagcgaaacccgctcatcatcatatcttcatctttgcggctcaggagtcgtccttggggcccaatacacggctggtacgatccctttgacgtcgatttccattccgcactatcatagtgtggataggggtcattgattaattgggccgaaattcgagattgagtggcgtaagcgctcgggaacggatcaacgggttgttctgtagggctgatacagatcagaatggaccaagggagacgagaaaagagggatcttcaattactttgatagcttcacacgcaacggaactactagagcttctctggaatagggaacaataaaaaacaccaggcacagggcggcgatagcgaagcagcgccttggagaaccgaaaaacttccgcagcgccacgaagaaatccattagaatgtgcaaaatctacaaagatgcaaaacattaatctgggagccttgcaagttttgtagctcttgagaatcccccagggctagtggcttggctcggcttatgggttctatcgtgtgtgttgggccaatcgtagagagagaccaacgcgtgtagaccgacagactccgagccaagagaataatgagcagtgtaaaggacagtagagatcattcctatgttacattctttggtctcaattcatgcccttcaaggtgtttccataaattaatgaccttaccttgaccggcgtgacatctcggatcccgccggatctgcttatgttgatcttcgtagccctaattttatgtgctcgtactcgtactcgtcttaatagggatagtgatcgctaggcacatccatatgtactcaaatactaaactaacaagatcgataaaaaccatagctccaatatcagcccacttgacatatgaaaaaaaaaaagaaaaacgcatatatcaaacaggcattccaatatgcttacacgtatcgcatctcttccaaaatcatggggtttgatgtcagtcagtcgcagttcgccgaccccatccactgaagaaccccccaccagtgttattgggtggggcattggccaagctgatccgcgactgcgatactccaacaaaggaatggcgggtttcaataatatttaccccctgggaggtcttgagcattctccgcaatgaatcgtacttgccttttacttcctcaagctcttgccgagcaactgcctcggccgtcttggcagtaaccaactccatcagcaacgtctcttcggcggcaggtctgttattctccgtcgacaaaacggtctggagacccaggctgcttgtccgtctgttatatgtggggctttttgtggagctggtgcgggagagcttgaactcgcgcagaccactagtgggagattgagactcgccagactcaatcgcagaatacgttgtgtctagcggcgtttccgatataggagttttgaggatccgcagctcccggttcatacgctcgagccgctgtcgctcccgatacccgtcttgaatccggccccgagcttctcgtaattgctctttgagggacgagttctcctgttcaaaatcgtcgatgcgccgggtgaggttcaagcaacgaccggcttccacctcgtgcatttccttccatcgagcaacatcgtcattgagctggagcttggtctgggtgattgaaatacgcttcggttggacggattcaaaacgtgcttcggctttcgttactaactcggccggttgtgtctcagccggctgttctctaatttgattcaacatctccttggccagggtgtggtcttcctctcgctcttctctctcctgttgcagttcacgtgtgaggttagcttgttggcgttgaagatcgctgagggccatcagaagttcttcaatctgggtatggaggtcgcggtctttgtgatgtgaagacatggtggatttcgcgcgcggtttttgattatcgacgctagctacaggcgctgatagttcggtcgcagcagtacttgcgtccgacgtagtttcaatagagttgagagtggaagtcaggctctgcttggaggtagagcgacgaatgttctgacttgacgggctactattcggactgagtgacttgaccgaattgtgggagtttgatgagccagcccataaccgcccaaggaagccagatgccgttgcctgcatctgcggaaaggagggtccggagggtgagcctttcgattggttatagctggcttcaagcttttggagactttcattcgtcacgagagaggtgagagacacgaagtcattgacgagatcatcagcattgaaggcgtatctgaatatcacgggttagccgagttctttgtttagaagatgtgctttgtgcaatgtccaaaacttacgtgtcccacaagcttcgagataataatagttgcatcacatcctcgaattcgctgcaagccaaaattctcttttcgttgcgttgcatcagagaaagcgcaactcgcatcaaagtctcgcatgcgccttccaaaaagataacatcataaattcggagaagcatagggagcggacaagccaccgcaaagaatgagaggaaccactgcgatacgtagaccggctcaacgtgcagtgcttcgagatgttggaacaggaccggcctgtgccgtgccaaaagattttggaattgataaacatgaaggtgaagacccgaaagatctggaagatagcaacttcgcaggttatagtgatccatgaggctacaatatgttattagtacttctccaagtcatatcatcgcccaaggagacttaccggacaagaacacaaaaggcctccgcatctgtcatgtgcatgagcagggggcccaccacgaatccaagaccttgacagtagccaatcttagtatcgtacagactaaaacatcgcaatacacggccgagcatttgttgaccctcgccgttcgggtcgcgaaacattgcaacattgggaaagctgcgaccaatatcttttccgatcagcccgtcgtacggactgctttcgcccgaaagcctttggaattcattcaatagatgaggatcgcgtgcgcccgctaggctaggccacacaactcctcgcaatggcggaggaacacccccttggatcttattcgaggtcaatgtcggcaaacgctgggcagtccggtggtaatcggcaaccagtgcagcccaaaactccaactcggtcattggaggagggggtaactgcgagtatcgcagctctgcccgagcgggatcccgaatgagtcgcttgatatggtgtagtgactcggagcgggactgccgctggtatttgtcatgaggaacctcggatatccccgatttggggttggtcaccaacgcattgttttcttgttcgagtcgagcgaggagcagggctgtggactaaaattaggccaagaatgttagcactcattctagaattccgcgaaaaagcttgtcacacttacttcatcggacccctctccacgcggttcttgttcttctgtcttatccagcttctcccaattcacctcattgtcaaacatttccttagtctttcccgccttatctgcgcttgtggtttcgggagtcggggtggtcctcgctgcgtcccgtaatggcattggcccaaaggaatcctcactctccttctcgagatgagtcatctccactggggttggaggaatttcaagagtgcgccaatccggttgggtgtgctctgaactggactggttatcggacaacgcgacggtgaccattgagtcatggttcggcgcgtaaccaacgctcgaagatgttggctcgaaaccttccattattgtgaatattgtgacgtgattgagaatcgagtatgtgactgggggttgcaggatgtagacgcgttattgttgacaatgttgatatcggacagggttattttaggcgggtttcaactgcattgcggatctcttcacaatttcgagtattcaagaaaacggattctttccagcagaagtgggacctggatatgattctaaacttgtatccagtacaagaagaaaaggctggagaaagaaaaaagggagtcaggagagatcccacctatttcgttagcccccctttacctttcccctcgtgtagtctcggccccgtcgatcatcctcatacaccgactgtttgaccattgaaatagatagattatgggatcttggaggaaacggctacagatattgtgactacgctgtaaattgtatgaatgtagttaagaagggccaattccatcgctcttcacccatcagagttccccgacatcaaccgaaattggtatcggagggatttcgagtccattacggagtattgcatgttccaattatacatacataggactcagatacttgaagtcatctgaatgtctcaagtttagttatttcaactgcatattgcctgcaggtacatagtacagcctctcatatttgaaagaccaaaggccaaaggggtaccgtcattgtacaccgttatatctttgatacataaaaatatccatctgtaatctttcgtagctctgattggttgatatcttaaatatagccgaattgattggtcgcgcccctagcggagattgaaatacaattaccacccctggcttgtccgttcacctcaatattgaggctggccaacgttgttgtacttcggacaccgtatcattaactcattcgtaaatgacttgacacagacttctttctacctatattgtaggtttctgaaccacccctgggcctcacaccatcgactattcccagagatccacagagtgaggtccatgcggtccgcctgtcagacctgggtggtcttccaatccacctttcgaggtttcaaggagtttctcggatatgttttcagagtggcgttaatggctgtctatattcatccagaactccgtacctgtatccactagaaagaatttcgggatgatagaatgacgtgtcatagcatatgactttaaccaactacataactagtgataaagagggatgtgcactgtgggcaatctggtctccctagacaagaccaggggtgatagggtgatagagagaataccaggggttgctctagaataataatggaaggtggaaagtgggaagtgtctgtattgcagtcttacagtgttcgttgtaatttctaaacatccaatcttctccaagcgcccggacaagccgaacagttgatgaaaatgagttcgcgtcgatcggggatagtgtaagcccaatgacactgtgcaacgaggcatgtgcaagcacagaggccaagtcgcgaggtcaaatattggaataatcatgacgttctgcaatacagaactatcagcgattgaactgataagaacagatactacacttgatctaagccagaggcaaagagagctgaagaagaaggaaaagaaaaggaagttctgggggcagggccaccttcttataggtatcctaagggcggtcggtttatgccactattcacaaatgagacaaacaacgacnnnnnnnnnnnnnnnnnnnnnnnnnnnnnnnnnnnnnnnnnnnnnnnnnnnnnnnnnnnnnnnnnnnnnnnnnnnnnnnnnnnnnnnnnnnnnnnnnnnnnnnnnnnnnnnnnnnnnnnnnnnnnnnnnnnnnnnnnnnnnnnnnnnnnacacttgatctaagccagaggcaaagagagctgaagaagaaagaaaagaagaagaagttctgggggcagggccaccttcttataggtatcctaagggcggtcggtttatgccactattcacacatgagacaaacaacgacatatgctcgcttaattgaatatgtaaatggtaacgtgatgatagagataatcaatgttgataaggtagatagctggataccataggcaaggatatctctttgatgtgtgttacttattggtagtgacaggcacacaatgtgtcctcatagtcactttatatcaagtacaacgctatggatatgggaaatttaagcctcacctacctacatcctagagggagaaatagattctagtcagatctgacatttgaaggagtctagttactccatacttgctctggtttcacccacatttagactcaactccgtattggcgctaacttcattgtgacatttgggtaaacgacagggatgtcatgtcagagatactaatcatgcagtctataaatctgtagatagctgtttctatctcatcttctgcgaattggaactgcctgttttccctcgtttgtttgtgaattgcctatttgggtcacatttacaggcggtgaggaagaattatcatccgagtggttacaaactgcccaccgccccctgtcagtcgcgacttccccgggcaaaaaaacaacaggcgcttcccctccgcgttttatctcatttctcctcttttgcctctcgctttaatcatttccgacttgagcatgctggagcttcattgattcgctctttggcattgaaagatagcgtcattcgttcgcttcaactctgaggcctggcttgggctctttccttcccccgtagcgctctatcaccctccatctaatcactcacttctatcatggatgactctatgaacgaggactcggtcttcgatgatgatggaggcagctctgactttgcccctgagcctgcaccggtatgaactttcatcaatatactaacaccagactcaactttaattgctgacattatacgtccccagaaacccaaacccaaggcggcccctaagaaagctgctgccaaacccgccgctaaaaagaccactcagacaacactaaaggtcaagcctgctgcaaaggcagctgccactaagaagaaggttaaggcggacagcgaggacgaagtgtccgatattcagatgtccgatgcggattctctgctctcccatacccctccaaaggccaagaaaacggctgcgcccaagagagctggctcaaaacctctggccgatgttgaaaatgagtctcacggaggagacactgctgccgacagcgcgagtaagagtgtgaatgcatctgataagtaccagaaagtaagtcccctacagcttctaacatggtataattttggccgaatacttatatcaattcttaaacgcagctcacccaacttgaacacattatcaaacgtcccgatacctacattggatccaccgaacgcaccacgcagcagatgtgggtgtacaactccgtaaccgagtcgatggagtaccgcgatgtctctttcgtccccggtctctacaaaatcttcgacgagattgtggtcaacgccgccgataacaagcacaacgacgagaacatgagcgagatgcggatcaccattgaccgcgaggccggtgaaatcagcgtgtggaacaacggacgtggtatccctattgagatacactccaaagagaagatctacgtacccgaacttatcttcggccatctgcttacttcctccaactacgacgatagccaacagaaggtgactggaggtcgcaacggcttcggtgccaagctttgtaacgtcttctcgacagagttcaatctcgaaacccaggactcccgtcagaagaagaaatacaagcaaacatggacccagaacatgacgaagatgggcaaggcaaagattacagatgccaagggagatgattacaccaaagtcactttcaagccagactttgccaggttcggtatggatggcatcgacgacgacttcgaagcccttgtcaagcgccgagtctacgatttggcaggtacggccaatgttgctgtcaagttaaacggcacacgcgtccccattcgcagtttccgaaaatacatggaaatgtacaccaaagccattcgcaaggagcgcggtgatgatggtcctccctccaaggatgaaattattacatgtagccctgaccctcgatgggagattggttttgccgtttcggatggttcattccaacaagtctcgtttgtcaactcgatcgcgacaacctcaggcggaacgcacgtcaactacatcgccgatcagatttgtacccgcttgtccgaccaggtgaagaagaaaaacaagtctggagcaactctgaagtcagcgcagattcggaaccacatcttcatttttgtaaaggccttgattgtcaacccggcattcacctcccagaccaaggaacaattgacgacaaaggcgagtcagttcggtagcaaatgcccccttgatgaagatttctataagaaggtcttgaagactgaggttatgtcaaatattttgcactacgcggagcaaagggccgaccagatcttgaagaagggtgataccggccgacgcacgcgtatgaacaacccgaagttggtcgacgccaacaaggctggtacaagagagggtcaccactgcaccctcattttgactgagggtgaatcagccaagggattggccatggcaggcagagcagtcgttgggccagacttgtttggtgttttccccctgcgcggaaagcttcttaatgtccgcgatgcttcttttgaccaaatctcaaagaacgtggaaattcagagcatcaagaacttcattggtctgcagcacaagaaggagtacaccgagaccaagggactgcgatatggccatcttatgatcatgactgatcaagatcacgacggtagtcatatcaagggtttgctcatcaatttccttcaagcgcagttccctagcttgctcaagattcctgagttcctcattgagttcatcactcctatcatcaaggtttggaagggtgacccaaagaacccgaccaaacagaaatcgttcttcaccatgcccgaacatgacgaatggcgtgaagcccacaaacacgaacgcggctgggaacacaagtactacaagggtttgggaaccagcaccacagaagatgcacaggtttatttccgcgacctcgatcgccacctcaaggagtttcacaccatgcaagacggtgaagccggactcatcgagctggctttctccaaaaagaaggctgatgagcgtaaagagtggcttcgtcaatacaaacctggcacattcctggatcattcagtggcgaagatcacatacaccgacttcatcaacaaggagctcatcctgttcagtatggcggataaccaacgctcgattccttccgttgtcgatggattgaagcccggtcagcgcaaggtgcttcacacctgtttccgtcgcaacttgaagaaggacatgaaggtagttgagctggcaggccatgtatccggaatgacagcctaccaccacggtgacgtctcccttcagcagactatcgttggccttgctcagacctttgttggctccaacaatatcaactgcctggagcctagtggaaactttggtagtcgacttcaaggtggtggcgattgtgccagtgctcgttacatctacactcgcctatctccctttgcacgcaaggtcttccatatggccgatgaaccattactaacttacaacgaagatgatggcaagaagatcgagcccgaggtctttgtgcccgtcgtcccgatgattttgatcaacggcgcggatggtattggaactggttggagttcttctatccccaattataatcctgaggatattgtcaacaatctcaagcgcctgatggctggcgagccgactcagccgatgcagccttggttccgtgggttcaccggtgaggttgtagccgtcggtggggatcgcttcaaattcagcggtatcatcagggaatgtggtgataaggaggtcgagatcaccgaattgcctattcgaacctggacccaggatttcaaggacaagcttgaggatatcattaaggctgagaaggtgccatccttcatcaaggattacagggactacaacactcacaccaaggtccacttcatcatccaactagatgagaaacacatgcaggctgctctgactgaaggcttagaagaaaaattcaagctgaccaagtcgattgcaacaaccaatctagtggctttcgatcccgagggccgcatcaccaagtacgccactgtcgatgacattctcaaggagttctatgttgtccgtctcaagtattacgagcgacggaagcagttccaacttgccgaactacaaagagatctggagaagctgagcaaccaagctcgcttcgtgaagatgattattgaaggcaaattagtcatctccaagaagaaaaagcctgttctcatcacggagttgaaggaaaagggcttcaagcccattgccaaggtggctgaggccgctaagatgggcgaagatgagcctgtggtagaagaaggagaagaggagttggatgaaactgacactcaagtgctatccagctcatttgactaccttctgggtatgcctatgtggtcgctgacccaagagcgcgtggacaagctccttcgccagattggcgacaaggaagcagaagtcgacgtcttaatcaagctgtccaaggaggacatctggacccacgatttggaggagttcatcaaggagtggcgcttccagcttgaggatgaggaccgtcgcgcccgcaaggtggctagcctggaccgtcgtgtctcgactaagctggccactggtggtggtcgcgctgcggcttcgcgcaagcgtaaggttgctgctggtggtgatgacccagacgacgaagacttcggggcccctaagacaaagaaggccgccgcagcaaagaaaaaagagcaacccaaaaacagcttgatgaatttcctcagtcaacctccaaaatcaaccccatcggccgcaccagacggaactgactcggacgatgaattcaacatggacatggagatacttccgaagaagagccgtgctacctcaaagcctaagactctgcctaaagaagaagacgactttttcgatatcgacaacattccccagacctcgcaggcatcagctcagccagttgatgatccgatggacgtagatgtggatgaggtgccaaagcccaaaccggcagccaaagcaggggctaaggcagcggccaaaccggcagctaagcgaggacctaagcctaaggctaaggtcgatgaggattcggatgacgatttcttggagattgccaaatccgaggcttccaagcccgcagtgcagtcctctcgcgctcgcaaacctgtgaaatactcagcgcctagcgattctgacagtgacaacggtgatgatcttcttggagacgtcagcatgatggtcaaaggcattggtgctgactcgggcgccgattctcgacaactattctcggagcgcccccgttcggaaagcagttccagcgtgaagactgccgcgaagtctcccaaggtcaacgacgattttgatccggatgagactgactacagcaagcttattcctcaaaattccccacgacgctccatccaggtcaagcccaaggacgtcaagctcgataacaacgatgaagatgacgaggaggaccagccggtcaagacaaatgctcgggccaaggctgctcccaaatccaaagctgccctcaaggtcgtcgatgatgaggacgaggaggagccagtcaagacaactgctcgagcgaaggctgctcccaaatccaaggctgcccccaaggtcgtcgatgatgatgaggaggacgacgacgagccgatcaagccgactgctcggggtaaagctgcacccagagctaaagctgccccgaaagccgctgctgccacctcggcaccaaaggcccgtggtcgcccaaagaaagagccagctgcgactccgaagcccgctcccaagtctgctcccccggctttatccccggcggccaatgcatatggttctaagcacagcaaggcaagcaagaggatcgcggatgattattcggaggatgacatcgacgcaatggctaatgacattttggattccccggcgggcaaagtgaatgtggatatttcagaggacgacgagccggctcccgccccccgtcgcgccgctgcaggccgtcctgctcgtggcgccgtacagcagaagaagtcctatgtcattgaggatgatagcgatgaagaagcatcggctgatgactttgacgaagacgaagatgagagcgactaagtagtgaaatagtgagggtcggaagcccatttgcgatgttctgctttttttttttgcgacgctctttattctggtttttattttctttcatttccatgtcttactttattggtattttatggagatctggcagagccagtggatgcaaggcgaatatgcgatgttcaatcttacttttctatgcgtaaatctttcaaccgtagcctcgaataggctgtttggaactccacagtgtcaactaatccatcgaggccttcaattctgtttcatacaaatctaataaagggacactgacttgaataagcaaaccctcaactcccaagttatcaaatcacacaaatgttcctcacaaaatgcatagagacaacaccaccagcaaaatcttcagctcctagaccataaacgccgttccatgtcaagttcgtagcgtaatcgactatcaaagcgaagctcgacgtcgcttacgactccgaaattcgtccccatcgagagagcgagtgccggaaagaggggtcaactcgtcatcatccatgtcagtctcggttccgatgctttcaagctcattcatgtgcagacgaaggagagcttcagcagcctttacttcacggttgaagtgagccgacggctgaagacgcagagctcgggactttcggctggggtacttcttagtctgggattcggggctgataggaccgtccttcgtaaaagaagctcccctaggggtcctcttcagagggggtccacggtagtcttcatcatcagcatcgtccatttgccaatcatcatccgaatcggtttcatcatagtcgctttgcatggtagcgacatccgaagcggtgttggtgggctggtcgaggccaccgagcttgtcggtttccatatgcccgtccatagaaggacagtttggggtagaatacacgttggacgagccatcgctgtcggtgtcactgtcttcgctgaccccagggacattctccgggcgcatagcatctgagatggcacgaagaatcgtccgaggcgattcgaaccgcgagcgaggtatcacattggagctgcgcggggggttgatgggcgtaaaggcagacatagacgactggctcttgggcgacatgcagtaaggctccatggaggagtcccgggcgctgggatcactctcagcgtaatgggtgcgcggaatcttgagtggaggcagtttcaaggacgagtcttgtcggcttaatgctcctataccatggagaagggtatgggttgaggaaggggtactgattgcgggagggctgcctccggtgctagagctagacttcgtctccaaagagcgatagtagttggaggtgtgggtggcacgctgtacgatctctggagggatgaccatgcggccgtgggtcttgcggtccgttggggggatacacatggctgggaagtctgtgccaaacagtggagtcagggcgtatcggattctccagcagaaggttgctgccatggctttggcggcttcgtagggcatccagtatcctatgtgaaaagtgaaagtgttagaatcacccaaggttcttttggatgagaagaggatatcgatcttaccttgagcagaaagtgctccaccggtgatgctgtgacagatatcgcgcaggccggggttctggttcagcatcttggctggcatggtctatagtgagttagagataccaaacatatcgaagatctatcgtatgaacttgccttggggtagccattgcatttgaaaaggtgtgtaatccgaacaataccgatgttgtagtcccacataacatgccattccttgtcttcgccgggtatttggaaagtatattgaaatactagatgaaagagtcagacgtgaataccaaaacatgctcaatggcacataccatggaagctatctcggccggtcttctcttggaaggttttcttgtcgctggcataagggatatgacgaggatagtcggcaatgttgcccatgggacgtaacgagagctctctgtgagccttctccagatctgcatctctttcctcgcaaggaggatagcggcactcgccctggatcttgccacggcggaaaattggggcgtccttggccatctttcgcttctcttggacagggaaaggcgggtaaggaattcgcctttcgggctgaggattcagaagggagttgatagatagcattaagaagttcaagtgctatccttgagagaagaaaagagttgaagaaatacgaagactctagaggaaagaagcagcttaatgtctctttggaacaaaaggtgttttccagaaggatgaaagacagaacagtcaaacatgcaagaaaaaaaacaaagtagagcaagacaattcaagacctttgttcaaaggtttgatgtttgttccgcgcagcttctaaaggtgaggtaaggtgagtcaatacagatgttgtttgttggtaaagtcaactttcgaggagacagacagcggtgaatagaagaaactcggatctgagagttgtcttacacgaagaatggtaaatgggcttcaccgattctttgcctctctcttttctctccgcctctctcatatcacaagagtgaagtcggacgagtccatgggctgtttgtctctccgcgtggaagggaaagttcccaatgatcttacactttggactgatgatgcagtgtacattgatttcattgatatccctggaaacaattacaaaatacagatattgagacttgtctctcatctctcgaggcatagcctgttctacattcacacctgcaacttcccaagcctctaaagtgatccgtgaaagaaaagcatggcagcaaccgtttcaggaaccgtgaaaacgcagtcaccgcatgcaaacagcctgctacgcacaaaggtgcctaatattatcctcaattatgatgtaaatgctaatatcctggggtagagagctcaaccgttgtcccaccatctttctttttcttcagaatcttatcggagaacgcatgccagatcttccttgtcattggactggagggtactgagcaaccggagcattaggacaacagtccaatggcccaataagaagctacatactccatagctcggcaggatgaacattaaagaggtctcaggctcacgggaagctgcagggcttgtatgacaggaagctgcattgcctaacgagtccgcgaagtgcatctgagaaaagctgtgctgcacagataaacttctgacagaattaacgatactgggaaaagtgacagtaatctctccacttgcgtgtcacgcttccttgcctacacagtgtaccctagactgtgcaagcggtctataaatttgatatgatgggggtaaggctgaggatacaaaaaaatgctgatcatagactagaatgttctttattgtctattaaatgcaggtttgcacctcggttcttctctttttgtcttggttaatgtctatttgaaactatccgaattctcagctagaccgctggttgaaatcccagggcgtgggtataacagagacatggactctgcggagacgcaagagacataacgacttcaaagaatattccatgcatccttctatgcagtattccgacacgttggtggctgctagagcccacttttcctttctttatctttgggttttcttttctgcttgaatcaatcaacttataccagtgtcacagtgacttcccccagtccgtttcgcaatccgccattgtacccacctgccagtctagtgtagtctgcataagacttccaacaggtacaagggtccttccgccaatcggtgccgggccggggtagcatcctgagcactgcagaaaacggtgcatatagatgccggcaggacgctacgcaatctagccagagactgtaaatatcgaggactggggtttcaactagatgtcaacccaactgggctagtttcgagtgggatgggttcaattgcattggagtcggtctgcacagagtcccaacagccgagaccgctacgagagtctggaaacgaggactggtttccaatgtcttagacactctgctgctggctaaacatcctccgtcaaatcacaaagagcggtaaaccgcgacatgcgtgtcccctcagcgtctcagatcccggacttctggaaaaggggcaagaagccatgtctcaattgggatgctgctgttggtgtttaggcctttctcaagcagctattttcatgcctattcatttccataaagtatgatcgagcttattcgtaacatcgactctttcaggttgcccttgggcttccttctttcacgtgtttatcgaaaagtcggactcattgttcacatcagagctggacactcttggagatgatgtggtatcattacagtaggtctcagactcaacggtgaaaagagaacacaccaagcgtcatactcgcatgagcctgcaagactcggtactaaatccatgtctcaaccaggtgaaagactgacttctatcacaaagaggtccagacctcgacccgttgaacacagaataccaaccggacccgaaccttgagtccagacgctcaagattcacaagatactcctcgcccgcagagatcagacaacaacccggaatctgtaccacagcgaatccggggtatacggggtgtgagaggtgaagggaaacacagtcccgagcacgactgaacaaggcaagtcttcgagggagaggggaagtacaatgagatggaaaacaaaaccgtcacaggctggtccgaattgcaatatgacgaaaagggagccgggttgattgttcctcatattgagatggagaaagagcaaacctctacggctgtatgggtctacaacatagtaaatattcatgcctcaacggaaacatctccatgcgaatccattgttaaagatccctgctccaacaattctctgattttgaagttctgactgcatcatgctatcagttctcccaggcgcgtgaacagctcaacttccatccgctcagccgcatctggctggctaagaatttcgcccatcgggtcttctccaagatcctcctcccatactgtctggggctctgcattgaccttcagactcttgtacaggcacatccgtaggtgccaacgaaggaggttggcgctcacacgcagggttccactcagagcagagtttctaagacgagtgccaccaattcccgtagtatccgttacgaatacgatgatcttgtagtcggcctatgtcacaaccattagtatatatcggtagggtcttacatcggggtcaattcctatttcaaaagcatcgaagtgggtatggatgtcggagcggagaagaagcccattctggggagaataaaggccagattccccaatctcgctactaggcctagtgtcggtaatgtaccgccgatatcgatttcgttgccattcatccacattactaactgggaatacatgcgtagcttcgagacctcggaaaggactccgacggctggctatagcattcggcccagtaattgcacatgcggcgtctctagtgcggaggctgttgcgaaatttattctgctgtagaaattattagtactggttttgtatgcttaatcatttacacattccctctgaccctgggattgggaatcggcactttgagttctgacacggcgtggcgcgcaatttggtattagattgatgatgatgggcgcgtgatctatacgattgtcaaccttggaaacgccagttatgctagatgtgtcaaaaatacttagatctagagccacatagttaccaggattcaccaaactcgcactgttatgctggagtgcagtgtttatctggtgtgttattggcttgcaacttataaattgcccactcgttttggttaggggagatgaacaacaaccaacaatagcgacatagcatctcctcggagatatatcgagcttgttggacagttgggatttccagggctataacaaggctgtattagtcgcactggctcctataaggctatcgtgacttaccggcaagaagatggccgtcgctgtcatatatctggaggtaccttggtgtttcaagaacaagagctggcatagctgctgtcatattggagttgatgaaaagagaaagagaaaaatgaaaacaattgatagaaggcgactatacttcccgattaggttagcttggctctgatgtcatccttagattcctcgggtgtctgtggtgctaagtcttgcaaagatagaagtgttttcaatgcagaataactaagatggagagaaagaagaagcaagttgcaaagtgagaagcagcctgttgatatagctatccctttgcaaacatcgcaaccctcgagcccttctcttagctagcaaacaataagaaaagcgaaggtaagatcatgaatttatgtaaatgtagttccattagaaacaatatgaacccgaaaaagacatagacagggtgtttgcggaaaagaactagacaggtaaaaatgcccagtatgttagggggaataaaataacgaaaagaggcaatatgagacatgaaaaactcattcatcgctccaagaatcctccttattttttgtccgtcgacacgaggaattggtgatcagagcgcatgtattcccaaggaatccccaacaagaacaattgacttgacaaccgatatcacgtgccatttggtacatccagcaacagtcatggccagaataatgatatgcattcaccaaagaattgattgacgctcaagttcgaggccaattaacattcccggttaagatggcctagtactattaagacctattcagatagccagaagaggctcacgacccttcgcctgctctgccggctcaacagacgcaacaatgccagactcgagagcctgagcgacaggagcggccttgggggcctccgggaagtcctcgtgcttgataacgggctcgacggcaggcttggcgacaggggcagtgaagttggcagcgggctcaacggtctcacgcttgatcgggctcgcaagcttggtctcccgggaggcagagcgtcggtgggcgatgtaaccttgagccttagagctgtactcaccgacatactgcttcaccaagtcggtggcgtgagaggtacgctcgccagccatgtctcgaagctggttggtctgggagttgatgatttcctggtagttggtaatctgctcgtcgatgaattcacggttgctgatgtagatcaggggggtgaagtatgtggtggtcacggcaatcaaggccacgccccagaagggaaggaaacggagcagccagtagccgatgaaagcagcattgaaagcctaagccgttagtctctgcctttttatcttcgttgataagttcaaagttgcaacctacaaaaacggtgtggaggacattctcagcgaacaggatgcgctggaactcgatcaagaaaaagtccacgagctgctcgaggtcctcgaggacaccctcaataacctccttggggacagtgtagtaacggcgggggcggaatccactggcgattccccgcttgaggataagatggccagcaatctcgacagtggcggtcactaaacacaattgttaaccaaccactctgttgaccgtaggtcacgcgaccaactcacctcccaacgacatgtacaggaacttgaaggcccagcggaggagaggcatgtaacgagcggcgaagatgaaacagatcatgctggcgtaggaaacggcggtcgcacggggttgttcccactatatccagagaaagattagcaagctatccaacttgaagactcgggcgacaactcacgctcaaaaggctgtacatcaaagagtggtagtctagacacttgtcaatatcccatcacccaattaatccagttcttatgacctacgagtcaatggttgaccatcggcggtggtgttcgaaggggtcacacgcgagtttttcagatcgcggaactcatcgctggtgcgggatgcttcggacttcacattattgacaattgggcctgtggatgaactagtcagcttgctttgatcgactttcggagactttcagacgcctgcttacccttggtaataacatcgcggatgcctgaacgcaaaagggtcaaggtcagtctctcccacgaaatctagggaaaagaaaagagcgcaatactgtggggtgactgaggttagcatattcatgttgtcgaatggaattgacttggttctcttaccttactgcccgtgttagggtaggtcacgtcaccagaagccataacggtgagattgtgagaagcacttcagggggaaactttaaaaacggaattagaaaattcgtaagaagcgtatcaaccgagtcaagacgtgaaatgcagaaaagaaattaaaggggggaagggggagaagaagaggaagagaaggtgagagcacagaaaagataaggaaggattctcgacttccaggttgttgtgatgctgtcatgtgcgctgccaagccccgaacagctctggattcagggcatttgtcttatgacgaatatctacctgggaacatgtcttataaggagtacattcactggaaataccttttattgggaggggataactggaaaatacatagtctgaccttacaagtatgtttgttgtacatatcaggccactccgagactattgtgtcttgaacgccataccccaaagctatatatactccacacaatgtcgatgtacaacatagctatgacttcatacacaaccaatcacaactagttccctaaccttgagctctgatgcaatactctatcctacccagctgtaccccagaatccaaagtataagctttaagactgatttctgaatcgatttcgcttccatgttgggtaaggaccgtaaggtattccaacatatgatcgccaatccccgctagcatatttagcctcatcgggtccgaattcggtaataatctgctattgatctgttattagaaatggcattatattaggagtatcctaggtttcacttttctactttcttctaagtcggctatgacaaaacaaacgtggcaggtcattcaacagtacttcggttgccctaatggaaaagcaggtagctcccccattttctgccttgatatcttgagaccatcaccaagacatcggagtatagtacttctcccaatgaataggcgtatcagccttctggaacttttccatccctccagaaacgccatcctccgtgaccacccaatcacccaactcaacacgctctgcccaactcgtcaataatccaagaactgccaatgaccccatacagggagaagcccagagtagcagataatttgatatagctgatcggcttcatcggtaagtaggggaggattcgaagacggaccaagtagcaggtcgttgctacttcgcgcatagccattcgcaccgataccaaacggtaaaagtagcttacactgatttccatagtcttgcgctatatcttctatgtaaagatcagtagggataaactctagttccccatcagggaaccagggtccaacctaaggggatttgctctctccctcacctctgaatagaagcagaggaattggatccttctcgttatagtcgatcctgttactcaaatcagagaaaagcttgggaaaaggctgatctgcaatatctgacggcgattggagttgaactccgggagcgatatatcggaacgaaagacgtcgattcggaagagcgagaagaaacgatcggagaaaagtgtcctcttttatataagcctcgccgaggaccgcggtaggatataaaagatctatctgggtctggagcgatggtagcgtaaacttggagtcactgggaagtttttgctcaatagcgtcgataagtcgaacaaaaacggccactgctctttcaacgtcacgctttgtgaaagtttcaaaattccatgaaaagaatttcgaaggcgttgaagacgtgtacacttttctatcttcaatcatctgaaggtacactgtaagaatatcctgtagaggtctccattgccatgatttatcgcaatcgcaaatcagactttcccagtctggaaaaaaagctgtaagctctgtacctctgatcgaagctaacttatagttagaatagaatagtgatataggacaagttgatcacgaacatgatactaacttcttcaacatcgaccgccccggtagccggatataaccaaacaaaacgatcaccccatgttttgagggttgaggaataaaaaaacgtgtttgctcctgtaaactatgcaaaaaataaaagaagcagagacctgagcctattaccggggcagaaactaccttcgccagacgtaggaacgaaaccagattcggaatcagacgggaatcaatttcaacgggagcggaagtttgccaccaactagtggaagacaatgtagacaaatcatttccggccgctgtccatgcatattctaaaatcttgttgtgaagatcggcagaaagtgccgggtcaaattgggactccggcattagtgcagactagcagccagtagggcggacctgatagggcgatcaggaagctttcacggatgacacgggatagaacacttcggacactgaaatgagggagttttgcaaactttgctggataaatacgcccagcgagggtggcagttaactaaggggaccagaagaggcaaggatcgcgctagcacgctaggctatatcaggaggaagtagggtgttattgcagggtccaatgtgatatgtttagcttcacaaggtgctatcaaattggactgaaaatgttgaaatgggcgttaatgaaatggatgaatggggttgctagtgggattgagaagttcaaagacactgatagtaattaagagaagtatcagatcccgttgtcttgggtgaaatgagtccttatgctatctaaatacctgccaagatgacctggcagcatcaaattcaagtctgaatgtagatatataatggcgatacagatacgctctcacgctctcacatccagatatacagtgtcagttggacatgcaccccaaatgagcctcaatttgggcgggaatacgatgatcctggtgtcactcagtgcaccatttcacgtagtatcagaaccccacaaatttgtgcatccaccttgagccctacggccgatattcaccccggatttcgttgcccctctcaatcgagatattcgcgctctgtccagaggtcgcagtttcccaggttctcgaggtgacgatccgaactccatcgtaggctccccttccgtggccaccgtattgatatctccctctcttcgaatgacatcgagaagaacgccgtggccaagccaccgacgctgctttccatgacaccggcttctcgacgtggtcaaccatggcattgacgtgcgctggctctcccaggtgaccgagaaattcccacaagagcatcaccaatgaggagaaatggctggccatccatatctacaacctggaccaccagaagatccgcgcgagctaccacctacccatttcggcaattaggccgtcgagtcgttctcaacccgatctttgacgagacaaagacccgtgaatgcagagatagacgcccatgtatgaggtaaacgagaggccagacgaggctaaacacccgggcttccgcgactttgcgcaggagtactactaggatgtctcctgcgtggggacgccgtgccgctggacatgccggatgacttcttcacggaccacttcaagtgcgatgacatactttcgtccgtcgtcctgatccgctagccgtttctgacagacagtcccgcgaccgccatcaagaccgccgacgacagcaccaagttcagcttcaagtgaagacgtctccttcaccgtcttgtaagtccaaagtgcaggatctcaggttcgaacccttaatggtggctagacgtcaagccggatgataccgggtatcctgtcaaccggcagccacatggcccacatcaacaactagtactccccggcgccgatccaccatgtgacatggatcaacgccgagcgctagtcgctgccgctctttgtgaatctggactaggagaatgaattgtgccgtgagatcctgcgcatccggagattccgagggcaaggacaacgagcgaaccatctcctatggaattatctacaaagcacaggatggactatttggatcgaattaggctttactactccgtcatccataatatttagtccttcaagggaagcgattaccatctcggcaagacttgactaagtccttgaagcctagttctagctacctagttaacttatgatactgaactaacgaactactcacgtagttaaccagttaactaacagaagtaactaatagacaggagctgttacgaatagaaactgtcaaaccgtggaattcaatatttatggccggaaggggaaggaccatggatcgacagcttgtacataggattgtcttccccactattgatggcctgatccttatcctggggatattctgacaacatacgtcaagcctagccctacagggagttcaggactaccgagtcaaggactaaggtgcagggatttcactggaggagccgtcatttaacgctcactgatgtcaatacaaactgcgtcgaactcaagtatatcgtactttgttagtctcggaacatgtcactgctgatcccgaatatttactagggctaaaaaggtctggattgttgttggacgcagtgacttttttttttgtcacgccactcgccactggtgaactatcccaggacatcagaactgaacgattttaacggaatttgccggttctgtttattattttgtctccacagacgttattttctatgacatggaaaattcttcagccaactgccaaaatggggttcatgcttcatgccacccaacccggcgtgttccgcagccacaacagcgaggaaacaggttggctgatagagcatcagttgacctaatgcagagcttgactaaatgacgaaatgacgaaatgaagatcaatcgaaattgaattgcttatattgagcttcttctgcttcaaagtcttgttttttcttttctacattcatcagcaacaagccttactctccaatcagccaagtcaatctgccagcttcaccagctatggaatcattatctgctttcgtcaagcgcaatgacgcgcttaaaatcaatcctccttccgccgctatccatatcactagccgtggcagtgactggctatggactgtctttgcgataaactacttctctcttgtcgtcttccttggcctcttgttccggaccccgcgcagagaccgcatcttccactacatcagtatcctgaccgttactctctctggtatctgttactttaccatggcttccgatattggctctattgctgttgcccccgaatgggtacgaagcagtcatgaagtcgccggagccactcgacaggtgttttggatccggtacttggactggtatgttaatcctaccttgatctaggatccctgatggaggtgactaacgagctattaggtttactacgatgcctttgatcattttcaatgtgctgctgacagcgggtgtctactggcacaccatcctatacactgtcatgatgacgatcatctttgtcatcctgttcttcgtcggtgccatcgtccctgatacctatcgctggggttactacaccatcggcaccgtggcgcttttccttgccttggagaacatcgtctgggctggcatcacccacgccaatgccctgggtggtaatatcaaaaagttctacaccttcttgggcccttacgtctttatcctctggatcctgtaccctatttgctgggcctgttcagagggtggcaatgtcattgccccggactcggagcagatcttctacggtattctggatgtgttcagcaagcccatcttgtgttggattatcctctttgcccacacccgcattgatatcacccagctggatctccgtctctatgaccgtggagatgtggagaggaacactccaagattcaatgagaaggaggaagagagaggtgtggccgctgccaacaacgatcccgcccaaaatgtttagacccctgtccgataccccttgtctgataccaacagtcgagggattccctcgctgaagactcaaattgcgttgcagaagtgagaagtgcttcggcactccactattcccaggtatatgtgttattgcccttattgccctacgagatacgtcctatctgtatttatatgaacatatctaataatagtccaatttaacctcgattaatatatgcagacttctattcctattcactggctctgctataactagacaacaatccaatttctgaagctggccagatggccaggtacagtactccgtattccgagcgacgatatgataaatattgcgggggccatctcggggatcatcattgtgcctgtcattcagaaaggactctatccttaccttacaaagagatgagtctcatttggaccgattttacggatggcgatggcagtcagctccatctcctgactctctctatagtttacacttacctaccagggccatgctatgatacaccactcgcatgtcctgcttttaagttctgacgtactttggaacgttggcggaggtgttttgccttaccatgggaaccgattatgcttataaccacccgcctaaccttgtaaggctgtctaatttcgagctctcgcagtctactccgtaccccgtcaaggcttatccatgtacgtattaacctcgtatacaatttaaattttgagtttgattgcttaatttatttcgcttaatccctaaaaatagatatttgatgataatagttggacgatgcccactattatcggaggcagcttcgcttcagcctcggtctcagcctcattgggggcctaattcggtagtacatactccgtatacaacatgtgggcattcctctctcctctctcatttccattttcaaggcctaaaacgaaattgttactgaaaatggcagagccaaacctttctcccgcttgttttacagagtacaatgagcaaacccaaagcagcctattctcgctcctacctccagagattcgctatgagattttcgcttacgctttgacaagtgccccggacaccaggcaacgacctgagcgagatggatactgcaccagaccaggctatgagaccccccatcgaacctacacagaactgctccaaacctgcagaaaagtctacatggaggcatggtttatgcccttcatctgttcagagcatgcattctggatggcctcgtcggaacgtgttccggagcgaattatcacggttgagaagatgcagcaatgtctagatctaattcatgatcgacatggcgaagtgcagggcggccatattcgagtgtttcctcagctatggtgcctcgaggggaccaaagacttcaatggtatattcgccatgcgtcatttttatcccaagtctgtcaccatcactatccgatacaccgacacctggtactgggaatcaaatgatgagttgcacattgaaggagagtggggcagatggctggtgctgccctctagcgtcaccaggttctgcatcgatattgaaagcatcgagcgacgaaaagacgaagtagactatattgcgggcgaaatggccgatcgatggcgattccagcgcgccgatggcaccaacatggtcgcagccagggccgatacctccgtatccagatggacgggaagttccatgcttggcggagagcgctgggtgcgtgatgaggaggcgcctggtcagcttcggtattattttgcgactataacgtggcgaccttcgcaagagcccttggatgaccagggtttgaatcctcctctcgaagtcgattggatccgcccatcaattccggatttgggctgtaattatatcgaagaagcggatttggacaggctcggaatatccatgacagttcctgctgaacaagcggttgctgaatatatcgctgacagggatcgcaggcgtgatgtggtagagcaaaccgttcgccaggttttaccttttgtccagggatatgaagcgcttgcactgcgtacacctacagctagacctagaccgtctgactatgacctagatgaagaggttcaggttctaatttggcataattgggtttgaatatgtatttccttctcaatcgaaattcaagtgttcaagtgagaatcattccaacgaaaatgtaaaagttaccataacaaaataaaggaccacgtgacccacgcgttgccatcgaacccgattaggtctgttttgattctcattccccgacaacccagcgcgacccacaacccacaatctccatgattgtgcatttacgatttacaactctccctatacgccattaattgttagcttcatttcatccactttcgtcaacggcgcgttgtctaggtcatggcggcaagcgcgagggcgcagaagcctgtcggctcagcgccatggattgcagcagagaaggaaaacatggcggagcttgtagagcaagaactcgaagaagtggaataccctgtccgacacgaactggactggttaaatgaacatatgaccgagatattatccaaaggccaggcgtgagttgcgaccgcacactactatatgtgtctacttagctaacaatcacacaggaacttcgcggacgtgttcaagacgcccggaaagatgagaggtaagacgcctcgaaccgctcggaagcgtaacccggaagagtctcgagtggtgagtatttttcatcgaattggttcaacagctctcgtctaatgcctcttgtagcccttgagcgagatcttctcatccgcccagaaacaaatggaaaaccaagcaagcccgagcccattcatgcatcgtgttatttctaagcccgctccaatgacggcatcgcctgtgccccgcaccaatatcgtgacagagcaagcttcgcagcccgaataccccgatctcacccaaactctgaactccttccccacatacaacactgactcgggctatcatggcatgcccgatgatgatgagatggtactgcctgacgtgcaacaagaatcacaggcttctactcagccttgtacccagtcttttgaacaggacgcgcctatgaatatggatactcaagaggtcgagatctcggccagtcaacaaacgactgaagaaaccttccactctgcgcgggaagagatccgcttccgtggggagaccgtcgaaccaaacaaggacccaaccccaaccccagcaccagctccatcccaggagcgaacagcgcgtccagccgcatcggttcccaaggaatccgagactgaaataatgtcgactccgactaaaataagaaaatcgaaaccagatgtcaaaatcccggaaaagcaactggacgaggaacctgcaccaaaggacagtgatccggctatctcaaaacccgagccatccccggaaaaggccctggtggccccagtatccccagtagctccacctatcaagacgcaagagtctcatccagaggacgaggatatggaggatgccaccgaagatgctacggaagacgacacagttctcgacaatcttgatgatatcggctctccttcggacggttctactccagagcgaccattcgctcggaaaagcagcttgagctttgccactctccctgcgcgggaacctttgaagactcgaacaagccatattgacctggcgaaaatgagtactgccggacgtcccagttactttggcaaacagactggcggccataggattccgcaagctgcagcagatgataattccggtcccatggcgttggaaattgacaacgagaaagaaccaagtgacgaagcagatcctgaccaagctaccaggatgcacagcaaaaaatccacccagtccttacatgatagaatcagcatgctaggcaaactccagccatcccgaccccgaaagtcaatcccatccgcttctgggctaccaggtcagattccctacccagaccttcaagcttccaaggctgaagcaaagtctgaagcttcgaacgaaagggcacaggaggctccaacttcagagcctatgtcggtggacgatgactggatcaaacctctgagctctccccagaaacatgagctttccaggagcaagaccacagatgtcatggagaagcttgctgaattcgaaaaggcgcaagcagtcaataaaaaagatgcatcgcaaacagagcctgaacgtcccacaactacctcgatgttctcttcaccccgaccgcacagctaccagcaaagcgcttcttttcctcatatgccggttgatacatctactactccaacaggttcaccaagacgctttgacggtcatctcagtgcttcgaagctgaaactgcactcgattatgaaatctgccaaaggattgttctccagcactggcgccaccccacggatggaacattcatcgcctgagcaggcgcgcattcagccaggtgctggctcactcactaaacatgacaaacatttatctcaaccagtccctatcagcagtcctcaacgaccagaaggccggcgcacacgaagctcgaccgaaaaagaggagaaacgtcgccagcacagacgcgaagagcaggagcgtgaggatcaagaagaagaagcacgtgtcgagagagcccgggaacaagaaaagcaaagggccctccagctcaaatccgctcaggaaaattcctcggtcgagccggaagagagggcaggctcagcagtacacaagacctcccagtcacaacgccaacaatcgcgtgaacctgaattggtccaggagtctaactcgaaattttccatccctcagccaaagccaaatgaccgtcgtcctctcaaacccactcgcgagcccgtaaaacgcccaacgccgcaacccatgtcaattcgtgtcggcagcaccatgtctcgtcaacaaatccctgttccgtcgtcttccagtgctcaggagtcgagtgtgtccgtagccacctctgcccctgcatccaaaccaactctgaaaaagaagggtagcaatgcatcattacatacaacatcttctgcaagcagctttaagagctctatttccagtcaaacgcaagcccagcgcaaggctcaggttgccagcgaccgcaaaagggagcaagaccgcgaggcacgccggaaggaagaacagaagcgtgagatagaacgcaaacgtgctgcccagcaacaacaacaagatgaggcccgtcgccaggagatgagaagtcgtgctgaagctgaaagagagcgccaagctgaaagagaacgccaggctgaaagagagcgccaggctgaaagagagcgccaggccgaacgggagcgtcaggccgaacgggaacgccgtgaacggtcggctcaggaagatccaaataaagccgcccgtatggaggcgatcaagaaacgacaagcggagaatgctcggaagcatgggcggcaaggcagccagcaaatagtcaacgaggtaagcgccttgttccaattcgggttttcataccgctaacagtctccagggaccaattctgcagcacgagcagccttattctcagtcttctcaacggagtgacttgggttcttcccgtcctgcttctcgcctgggtagctcaattcaggcatttggcggccgcagcatcaacccacctccgcctaaccccgcgaaacccccaaagagaggcaacgatgaaaacagcctgcggcctgcgccgtctaaacccagcagcgtgcaatcaactggcgagtttaaacggcgaaagacagaggatgagcacaaccctattccacctgtgcgcacaatggcacaacctatccgtcaatcgaatatcagaaaggttagtaacatcggatcctatgcaatcttctttcgggcaaattattgacttcaggaatctatgcagccttctacccttggccgtggacagtcttccatggcaccacagtcgggctcttccagctacagaaatgctcaacctcagcgtcccgctcatcctatagtcacgtacacgaacggcaaaataccgtttgccgaaccaaatcatgcgcctccgccaagcgcacacaagattgcgcccaactccgtccaacgcccaccagccaaaccatctccaaagtacccaagtggtgaaagtattcacttgccggagatcaacactgatagcgaagatgatgacgattccgactccgagatgttccctgttcccaagtgggcacagtcaaaggagctggagggtcttctccgggagcaagatggtatggaagttgactcgatcttcgggccgattgcaccattctctctagaagacaccttcaaggcggataagaaggtcaagaaataccgtgaccgcaccagtagtgcgaactggtccggacccgatggacttactcaggaggagattcggagagatgttgctgaacgacagcggttgcggctcaatggtggttggagattcaacagccagtgaccagccaggtgatctttctttcttgaattgtacattggtctatacaataacggctgtggccttttttggggtatgaatttggtggtggacatggttatgccggtgttatgggtgtatcatctacatgatggcgttatcttgtattattcttgtggtcacttctgtttatggttttagacaacagctgcatagttgcatccatcggagcatggagttaatgaattgttattttggccttggatgttctcagtgttctcatgcattatgttggaattcatatggttgtcaatattaggggtgggaatgagtttagacttattatgcactacagggccgttctttacatgaactagcatcattggtctagtggtagaattcgtcgttgccatcgacgaggcccgtgttcgattcacggatgatgcacttcttttttcaattttgatattagttctacttatttgagctccgtctttctaaatatcatttaaatcttacttcttttttgcctttttctcatggcacgttatcttggtagtttaaatatagtatggttggtttccttcggcgtaccatcttgttgaagacatatatatagaaccactccattgttttacccaatctattatctaacaggtatccgcgacatcagataaatgaaaaccaaagaaaggcgctattacatcagggaatcctagtaaagcttgatcatttgacggtctaaccgacatagtcttgtacactctacactaacaccgaggaagcaaaaggcaaaggaacaaaacaaatatggcacatgtgcatcgtttatggtttgtacttggccgcatatttggccgcccattcccggaacatacaccatgagatggaaatgagaaacaagaagatgaaaggcaaaaaaagaaccccggtccaaacccatgcccctggcagcgccgagaatgatataatacaagatgctctagcctctacgcagtaaagacgccgatccatcacttactgcatatccggctcgatatcactagcccctccatcggcaacctcatccatggcatcggggttgagattggcagcgtcgggtgccacaccgatctgagtctcgtaggagatggtgcgccagccagatgcactggtggggtctttgacatattcggacatggggaactgttggatgttagaacggttcgatattataaatttgtgtatgatgcatggtaagactcacgtaatgatcattcttcttcatggtaacaacccagggaacgttgtcgaaggtcacggcgcgaatacggaagtactcgttatcaggaatcttgcggacctcccgaataaagctgtctaggtctggagtcgagacgctgttgacagcagtgaggaagttagtgggcgcaaggccgtagtggtaagcgggggaaccacggctctggagaatagtgttagcggggtttgaagagatgtaagtgaggtgtcgaaactaactctcgcgctcacgtagatctcgctgtgaaccttggagatctgctggcgaacagcatggtgaggcttctgtagaacagcaccgcagaaggcaagggcacgatccgtctcaatatcctgagtcggcaccgtggggacgcggatgcgcacttcctcgccattccgtatgaccaatgcatcaaggaattccttctcatacatgacatccagctctgaaacgcgagtgatgatcttgccatccagcgtgagaataatgtcggcttcctggaagctggtgctagggtcgggagtgacgcctgccggaggactgtcaaccttgcgcaccatgaacagctggtgtcgcgatgggttggtctcggtgaccttgttaatccactcctgcgagacgcccatgatgcgagcctggctcatctgcacaacatagctttccatgtttaagattcgcaacgttgggatttcgccttgctggatcttggaaataacggggagcaggtatggagtggcaaggccgaggtggtattcgacatccttgtgagagcttgccgagcgctcaccgaggtagttcagccacaaggcctgcaccacaccgtcttcgccgacaagcacaccgtttgaacattgtgaactgagcccagtgtccacggtcacggcgtcgaggttgattgcacggtaacggggggcagctgcgttggcggggattgacacggttgtaatatcagtgacagtagtcttggccacaacaatgcggtagttctggttgaagccgacaaatatggtatcctggccttgtttgatatagtcggtgctgagctgggcgctcttgaccggagccttgacaaggctggggtcgtattggatgatggagtagttctgaagcggatgtaggaagataaccttagcaccgacaatgattgagtcggccacggtaatgttgatgtcgcaaaggtcgtaggggacaatggctcgtgatactaccactagacccttctcagcatcgatgaccagtccaaacccggtcttcttagcttgcgggtatccatctagcttcaagggcatgatgcacgatacacgcacgaagctacggacaatctcggcagcggcaggctggctgataccgtctaactggatgaaattggcctctcttgggacaggaggttcggcaggaatgggatcggcgatatcggagaaatcccagacaccagactcgtcattacggaccgccaaccgcatcttggggtgccagtgacggtcaacgtagatgatgctagttccttttgtgtggaggtcgcgaatatggcggtaggagatcaccacacgagtgcgatcaggaatgttcttcatgacctctatgaattctttgagattacggatgggccgcttgtcgattgaatcaatgatccaccctgccacggtattctccaacttgaaagaacccgccgactcgcagacatagactccgcgagtagcaatggcataaagacgtgactgctggtacgacaaatcatggaagctggcgcccgcgactgtcacgaaacgatcgggggtgatatcatgaagatttcccacttgacactcgacctcaacgtcttgaccgcctctctgaaccagcagcttgacagattcgccgacactcgagtctaggatatcgtcgagacgaacaaacttcgtaagaagctccccattcaccttaatcagcacgtctccctccagcaacttaccatctgcgggcccctctggaagaatgatctccgccgcaagcatgttcgtttcagtaggtgctgcggcacggatagcagcctcccactccgggctcagaccaagacggcgacactcgtcgaaaggcctcaagacccactgtgtttgaatcgtaccacgagtgataggctgcccttggcggatacactcgagtgcacggagcgggcggtccagcggcaagaagtaatctgtcgcagctccgtcggctcggccaccagcctgcaaagcaactgcatggccagcaagattgaccacaggacttcctgaactaccgccactggctgcagctgcggcctggatgtagtttgtattgaaatcacagtagccctctccatattcaggcgcatttcggtccaatcgactgatcacgccggacagaatgctcagcttttctccagcatcgttacccacaacgcggatttccgtgccaacgcgcgcgccatccggctggagcttgagctcagtgactgccatatatcggattttcttcgggtcgaactttaaaataccgaaatcatgaacagggtcgcggtataccggtttgacatcgcactgcgatttgacaatcttgttagtaaccagacaagagttttgaccaaactatggcgcagcatcgacttacttcttcatggttgtcaaatatgcagtatccccagaaaggaccagaaccgacaacgtgacgattggtcaatatgtagccacgctctgcatccacgacgaaaccagttgcttgactggacattgagagctctgtatcaaacgaacaggtttgacaaaagtgaatggagacagcgcatttcacaaccttctcaatggtagcttgccattcaggtgaatctgctgcagcgggtatggcaactggtgagggagctccatctgaatccccctcaatctcatatacggttccgttcgcaggcgttgaatcgtcgggagttaagactgcaggctcaggtctgagttgcttgttcggatgctcggaattatcggccgctgtgctgcgctttcgctttgcactgatatcgcccatgccatccatagcgaagagatctgaggtccggaagtggtatggacggggttttaggcggttgacgagggtcgagattgcgcgggagcctcttgaggctaacggagtagtagataatggggtatcggacgaacgaaacacgtgaaggtgtagacgatgcggagttaaggaatgtgacgcaaatgaccgattagcggcggctggagacctcaaaggaatggaggttcggtttgaagcttgacaagatgacaaaggagggatggcagtgattcgcaagctccttctgcatagagctgaccaagagcaatacatccactagagaattgggggaaatgtgtacgcgccttgacatcgaggcaaaacatgccctccaacaaggtcccaaaggcggagaaggaatagggccatattattggccgagggcgttagttatatcttaggattattgccggcaacactagtacgattaccatcgtcttcatatattctgacaggttagagtcatacaagactagagcccgttggttctgctatctagcactagaagacgtcttaccttgaaaaggaggttgatatcaggcttcagaaggagagaacaggcggtattgccgataaggacgtgcatgtctatgcgcccaactgtcaaataagtttgaatctgtttaattttgagagataggcgcatggaatgatacgttattttcaactaatgtacaaattcggaggatgctttgtagcctgatctactcaaacatgagagttcttcctcggcaaatgctcccatacttccaaagcgggggacttggagtatctcccagtcagatacagatagaatacgactgctttgaagttcaactggtcacacacgattttcagccggcagagatggtgcgcatggtggaaggcccatgcttctgtgggtataatggtgttgaagggaatgggccggcgcctctcatagagcttgcattgatggcccaaaccatgatctgagccgcagcggtagacaaatcaggagctcgacatgatatgtggcatgccttctcacgcggaggattgcatatttcctcattaattagttcctcaaataattgattcagtcatagcgccagggctaggtccaccgtttccctgcatggacggaggacttggcctttgtggggtagaagcctttgcagagcgcgagaagagctcgttgagtctgacatatagctcattcacagcggggaggttgggaggcggtgtcatgatcgctggcatttggggcacgacgccactcggtttcttcgatcgatcggcgatagtcgcgaggtaggctaggttggcttgtaggcgtcgcatgcactccatatattcggggctcttctgattggctttggatgtatctggttgctcggacgccggtgaatttgtatccgggttggagacggcgccagccttgccggcagcttgaaggttcactacctcttgcaacaaggccgagttgatgtcaagcagagccgtgacacgggccttctcacgtgccgcaaactgagcctgggcctgggcctgggcctgggccgggttcggaaccgcaggagaggcaacggtctggggcgagttgatttgtgaagggagtttgggctgtgtgccgaggaggttgtttgctgatatggaagccatgttttgggagaaggtctgcgctacttgagatggcatgttggcgccagatgtgccttgaggggggacgaactgtcccatggaggtaggtatgggggtctgggtgtagggcgctgagaagttatccatgggtgctgctattatgattaagcatggtcagtccagatattccaaaataaagcgacctggttagttggcaacagtagacaggagacaaatggtcaaagccagacaatgccaagggccaatgcattgagagcggtagggccagtttcacccaagccgtagggggtttagggtgggtgacacaagcatgagggagcttgagtggaaataattcaatccgatcttgagcctcataggacccttcctttcgaagaatttgggcaacaattctagcccggggtaaagtgacagacgcacggtgccaatgataataacaaaaaaaggggggagggtaacgaaccggaagattgttgggggaaacctgaaggcatcatagctccaccaggaccaggctgcatgggcataccaaactgttgacccgatggtgtctttgattgggggtattgaggaacagcattagggtagaaagacatctgttggttttgggggctttgagtcgggacgggatagcccgcgggataaccagtattggggtccattgtgtattgagggaccatcacggttgagggagggctcaagggattattttcgccctgtaatatttcttctccagcgatcccctcgatttagggaggctactgtggctgaattacgcaggccgcacggacgagacggtgaaggtccaacggcgcctgttgaccaggaatccagggataggcagataggcgagatcccgaagctgctagaaacaaaaaaggagagcgatgattggctcaatcagaagacgggttgtattgggaacagggcgtctccagcgaactgggattcgtagcaagacagattctggtgcccagattcagagcgatcagccgtgggcgggctaatgcagcggagcctttttggaatggtggagacacaaggctcgaatgaatgacgttgggatgataatgcaatatgtcaagttgagtttgaacttgactttgtgatccagagtttaagagtgtacttgatgtttagagaggctggtgtccacagtgaaagtgacattcgacggtcacggggtacgatttatgcctcaggcaatgaatgttgatgcctggaatatgagcaatggtcggctaacgatctctctatttttgaccattggaactaaatagccctaataataatatcagacatgccattttcctttctatgatgtagctagatgtgaaataatggaaaataatgcaggaaaaccgtagaatattgggaaatatggtcaaaaagctatgcgcaatataaaacgatttcaagtacggagtagtccgtacgacatgtgacaatcgatagacgcctataccattttcctactcatagcaactagccgaggtcattaccccatgcaggcatcacatctcttaccgctatattaacacaggaagagcgctttggtcccgtcgttgggctcaggtgctggggagaacgccacgcacagaagaccaaagcccctcggcaaggatgccgaagggagcacggaaacttcttcccaagcaagatcgcactttgttgtacatatttactccgtaggtaaccatgtattttccaatcgcttggcacttatgtattgcttggcgatcagtacccacaaaccagactcggggagatgggcacacgcttcctatgtatgtagatgagatagggaattggagatccttcctaactcgacgtgtcaggaacagtcaagcgacacatcagtatctcggatgaaagggtaaattgctaaacgaccctatttatagtcaatcggtgcaggtgctagcgatccccactagactagacaacatgctcgtaaaggcatgcagcgtgttggatcagcaggggataagaaagcattgttaaatctgagtagtatgatcgaagcccctacaatctcgggaatattggcacaaggcaaccgcttggcgcaaggtttttggattacgattctagagtactttgtccacttactccgtagctacggtatgatggcttgcaggtgtctggcagttccaaggggcatgtttcaacggattgagttgtgaggcttgaaacctagccagtctacctcatagcggcacgaacagattcatatgggcataaacaacatagtacatacctagcttacctctcaagttcaaacacctgcgcagtcgtaagtcggaattcaaatctccggctctatcatccctatagcattataataggccaatgataggaaaacaaatccgcattccaaatcaagacctaatgcgccaaaatactccgtcgttggtttcgatactgtatctgcatggccgctctgcagatcagtccatttcgactccgtcgtctccaccggcctgggttatttgaagttgggcctccacctttgcactctatttacgcacggagtagatacggagtaggcagtgcgccacacctggacagacccagtgtggcttttttatgaacccttatgtgtaggcacatcgtttcgttagtcacagatcggcagtcgcaagctgaccagaggcattattattgctagtgtgtggccgtcgcagcagggtcttcccatccccaagtccccgtagaaaaatccacccttcttcgattccccttgtggcccactccggtatagaactggaggcaaaactggacaagcttgccaaccgtacaatccggggccagccgttgggtccatctatagggtatttcatcctgtttccgtggccaatgaccttgacagagctgaccctagccagggcgcggaaaacatgtccaggcgatcgccagaggaaccagagtatgcccattatgctatgatctacatagatagcgatggcaatctgtgccaaagggcctccgattccatttcagagagccgccagactatcctctcccctagggtcaccagtgaattcctccgagcggtggcgatgtcgagagaagcccaggcaacccgatgtcaaggcaagtgctcttttgaccccacatgaatgtcctattgacgtagaacagtttctcccgaggtcccggtgcggtctagcgggcccccgtttaacaaccacagctctgccccgtcgcagggggagcccgtggcttatagtggaatgtgcctgagtagccaacagcggatacaagttcctgtgcaatcagagtctacatttcacccgaccatgtggccaaccgaatcctggcctgtacaagcctcacagcccaagaagaactttgcaggtcggaacctcaccttggctgcacaccagaaagccttaatctctgtaaaagagagaggtctgttgcgtctctactatgagaaaatcttccaaaacctgcaacaaacaaactgtcgaataatagccaaggcctacatcaaattagtcgagccgcgcaagcaggtgaactatccatacaatggacggaagattgtcgaaggcagaactcaacagcttgacccagaggcaactaagccaccgtggtggccgcgtggagtgagccatagggagccggatcatcttccaaaagttggtaagacacaaatatcattccggatgtcctaccaagctgataggagtcagaacgcattcgacttttggtatacatgctctgcgagatgcgcgaatcgcatggaatcacaaccgccagattaaaacaatgcgatcagcccatccgtcgtcagatcctgccggtcgagcggctacaaatcctggatgaggcatatcgagttcgcgaggaagaggaaaaattcctggatggaatttcaggtacatactccctcgcattactcctcaatccccttctcacatgtatctagagggaaaacaagtgtgcatagctcgcaccaatcttcctcatatggcagaggacacatccagcgaacaaagctcgccaaccgaacccgtctcttcccagaatatcgagtccgagtgcagcgacggcatcttcggaatcgatataaccaaagtcaccaccggagacctgccgagcgcgtcagcgtacaatccccccaatccttatagcccgatgcacctgggcgccagcagccaataccattccgtcagcccctccaacatgtcaacatcaccattggaattgaggccaaagcacgaatcactgtctgccgggactcatttgattgatcggacgcgctccatcagcatggcccactacccatatcccggcgtttctggcattcaatcggccccgatggacttttacggtacccctaatatgccccaggatgcaggtgttccaatcactcagacatcgacggaaaacttgtcaacagagtcaatgatgccatacggccacccttattatttcaactattgagcgtctaagcatggaccggagcatggaggatatctttttacgataatgaatttcgttcgggttgtattggaacaagacagctctgtccgaataattatttacgagtaagcccgaggcgatgcctctaaagatcaccagttgaacctgtaaccgatgagccgagttaaaatccagggatagatacaaaaagatgggtagaggccggcctttttcccattcgattgccctgatatgcctataggcactgcgagtaccagtcattggagtatttacaggttccacttgtgcaagttgtgcttccagtccagcccaacccaccacactgaccatagagagggacaccagtagtgctaccagagctggtagtcgtggtggtagcagaggtagtcgtggtggtagcagaggtagtcgtggtggtagcagaggtagtcgtgctggtaacggtagccgtagaggaagtggaagtaccagaagctgtaccacccaaagcagccaagataccatcataagccggcttcttcaccagattcgcatcccaaggacacgcagcaccctgaccagagaatgtactaggaacccacgagtacttgtccgtgtagtcccaaatagtaacgcccacacacttagcatttgccacacaagccgcaacggtgttctggtaatcggtcgactgctgcgcaagcagggccgaagtcgacgggagagtcatccggatatcaagctcagtataggcaacttcgacgcccagggccgtgaacgcggccagattggtagtctgcgcgctctggctaggggtacttccgacgataaaatgtgcttgtagaccgacaccgtcaatcttggcgccgtactgctgtaccagcttgacgattctctgggcacctgttgccttggacccggcggattcgatgttgtagtcgttgtagtagagcttggcgtctgggtctgcggcggctgctgtagcgaatgcgatgggaaggtatgcctcgccgatgtattggtagaagacgttgtcacggtaggtgccgtcctcgttgagagctagtagtccataaattaagcgacttgtgatgatatgattcgttcctagttcggcactgaccttcgttggcaacatcccaagcatagcatttgcctttgtagtgagttaccacgttggtgatgtggttcttcatggcggcaagcagagtcgcgttcgtccaggagccgcttgagactggttatcattagatggatattcccgcattgaaagacacgagataacagaacttaccccaactgggcaactggctataccaaaccagagtatggcatcgcagcttttggccattcgtagcagcgaggttggcaatgacatctcctttggtataggaaaaggtgttctgagacggttcggttgcatcccactagcgacgattagcgatgtttgaatattacgctaagaccagcccaaccttctgcgcattaccgggtgtaatctgtccaaagtcgtctgtgttgctcagctgggcaaggtatgcggtatccgtcaactcggagttatcagtagctgatccgaagtatagctttccctttgcgacagcagcggtgttcaatccggatgcattggtcctattgagaatgggcattagtcactatcaactgccaccgtgctgggaattggaagatcaaccatacagctgaggaagaacactggccagtgccagggcaatagtggagaagtgaaccatgacgaggtaatcaacgccaataatgaattgaccgcaagttctggacctggagagagaaatcgaagggtcgagctccttttattaccagagataaacagcgtcaaattggccgggtcttggaggttttcaggacctccggcgctaggtttcacattagaccaccttgtcaactcgaacgggccgaaaggccgtggcatagttgccgcggccgtttcaaacagtcaaatgggcttggccattgctgagatgctggatgagcatgagttatgcacggaattcgttactttagcccgggaaactgacacgggacccgacgccacatagtgggcaggggagagaaacgaatagggagacggcggagcaaattccgtatttccttcacggcaaaaaggggcttttttccatattcttggagggaagaggagaccgggtaaatgcgattttctacaaatccgggggatcttcaaggctgtcgatcaattcttcttctcttctccgggtaaatcttgactactaacctaaaagtgcgaatagtcagatcagaatcagcttgataattcaggctgagcaggtttccccattgcgcattcaggtcagacacgattcaaacaatggctacgatcgacctgttggattgcaaccttggaaagaccttttgcttagaaagggggcgttgccgcctcaatgatatctataagatctgaaaatgcatatatacacacaagactggcgcttttgaggggtatcagagattttataacgtcatgttgctccgtggtcggaccagagctgagcgttgcgagtggtgaggcactgttccagccaaacccagaccaacaggtcgataggcaggaagcagcgctcccatgggtgtgatgactttatggacgcagattccatagaaatcaacggatcggttgaaagttgagtggtaggtttcatattagtgagatactactcagccagtcttccgagccttcatctctgcaatgtatttcccggtcttggagataggcacgacgtggatggtgacaagctcatccacaacctcgaccttgccaccagagagaatctgcaataaaggcagcttcttgccagccttgatcaaaccaccggagacagtctgcatgaagcattcaacaccttcgacggtgtactccttcttcttgtcccaaggaagggggaagatgtaactcaggtggtcctcgatagcgttcatctcagaaaatgccttgacaaagtctgactgggcgtccatggggtaaaggaaaacgaccgggaactcgattgtgctctcgggtgaaaggggatcagggacgaggcggatcccggcatcttctatatcaggaggttgagcggttttgcgagttctgatctgacgggcgcgcagagctgcgctgagaaccatattctgcttgcgcaccctttcttcttcggccttcttcctcgcggcagcacgctccaatagggccttgcgctcggcaatctttttggcagattctagaagagctttactttctgggtcaattgccaatcctcgggctgcagaatcttccgcctcggccactttgtccaacttgaggagtgccaaggaggagcgatagaaggccttcacgtttttggggtttaacttgagggtggaagcgcagtcgagggtacaggaacggtagtttcctgcaaatgatattagtcaatgtgccatgcaaccaagaggataagacatgcctaattccaagttgcacaatgcccggttgatatacgacgcctcttccaacttgcgcaacagcgccgcctcttcctcgaaatcttcgggcgcttcccacttattctccttggcattaatgacagcaagagcctttgtgtagaactctttggcgtcaatccacttgagtccctgcacagcttcatttccttgtcctttgaagctattcgcaacctcccccctggtaccttcgttttgtagagcctgaagagcatccaagagcacgttttcaccctctatgaacccatatatgttagccgaatcgaacaaccatgttcaaggaatggttggacgtactctcgtcacccgctttgtcaatatcggtcatgaacagaggcgtcttattcatcattgccatcaactcctctgacgaatgcgactgaatggctgcaatagccggcggaagttctggtgcattgggatcggtattgcgcgccttcagtgcttcctcgttgatcgggaagggagtttcgtttgcagcgaaggcgtcaaacccgggcacgggtacgccctgggtaacctcaggaggcgccttgttgaggttgagcgactcatcaaagtcatctggaagttcttcgacgcgcgacatcttgagcgttggtcacaagaaaatgttgcgcttaatttggtgatcgtccaatgcttagaaactatgcccgcgatgcaaacagtgcaaacaggaggggtttgatcagccctaagccctattaccggattagtcggactggaatgggatgcaagaatatcaaacttgcgaagaagaagaaaacaaaaagatgataggaagattttgggtttacaatcaggatattccgtgatgcactgggtgtttctaggtcgatgaccgcacgtggagagggcctgaggccgccattcttcatactctatcaatctatcaatttgctgctgttgggttatatttcatgatctatatacttgattcactattggctggttctatcggagttttctcatagcggggaacaaggcatataccacaccgtttgatgcatgaggaactagtatactaggcaatgactacaacccaggcagtgtcggacacctactatacaggcctgatcgtgtgtactaatccccgcaactgacagcctgcagaaagttaaagcaaccctccttattccggcgacaaacctccgcacctcggaggccatgtcatcggtgaaaccccgaccagaacaaaccccgcatcaatcgggttgaagaccgaaccgattcaggccgtataagtccaggtgctaggttacgagaataatctgatctaccccagatattttcatgtaataacatacaccacatcaccatggccaaaaacttcaacatcctcatcctacccggcgatggcatcggccctgagatcatggccgaagccgtgaaggtcctcaagttctttgagactccccagcgcaagttcgaactgcgccaggagttgattggaggttgcagcattgacgctcatggcaagtctgtgaccgaagaagtcaagcaggcagctctggactcagatgcagtgctcttcgccgcagttgggggcccgaaatgggacaatcaacgtcgtggtcttgatgggcccgaaggaggactactccaagtccgaaaggctatggatatatatgcaaacttacgcccgtgctcttccacctcgccaagtgcctctatcgccaaggagttcagcccgttcaagcaggaggttattgaaggtgttgattttgttgttgtgcgggagaactgcggaggtgcctattttggccgcaaggtcgaagaagaaacatacggtgggttgcactgagattatattgtcattgaatagctaacttttcttctaccacagcaatggatgaatggggttactccgaagccgagatccagcgaatcactcgtctatccgccgaagtagcactgcgacacaatcccccttggcctgtgatctcactagacaaggcgaatgtactagcttcttcgcgactctggcgccgggtagtggaaaagactatggcggccgaatacccgcaagtgaaattggtgcaccagcttgccgactccgcgtcattgattctggcaacgaacccgcgatccctgaatggcgttatcctggccgacaacaccttcggcgacatgatctctgatcaagctgggtcgattgtgggtacgctgggtgtattgccaagtgccagtctcaacggtctgcctggtgataagacactgaagacacgaccttacgggctgtacgagcctacacatggatctgctccgacgtaagtgctagaaatatgataagaaagctgttctgactttgttatagtattgcgggacaaaacattgccaacccggttgcaatgatcctctgcgtcgcgcttatgttccgatactctttgagcatggaagatgaggctcgacgtgtggaggatgcggtgcgtaaagtgttggattcagggattcggacgcctgaccttgggggcaaggctgggactaacgaagtgggcgatgcgattgtgtctgcactatagtataagatatgggaatgactatccatgattgtttggtcaaacaaagtctaagcatgtgtcaaactggctgatcaatgaatgcaaatcacctctaactttgataaagatagaagctgaccaaaggcaatgtttgttagatactggcgttgaaaggaaattagatagtactttccatgattccataatgcttaggtataataattagattggtatgttcctagatatttctcattcttcttctcttcttattcctctccatgtctaataccatcacttccacacccccacagagtccgctccaaggcgagtctcccacaagaaacggagtactcaacatgtcacccccaacgcctaccactccattgacaccaccaatggcaccccgacatccaagccagcatcaaaacacaccaggatcctgcgctctacgcctcgaaaacctggcacaacaaacctccaccgcaaaaagcgagctgatgacatccgtcgcggcagacatctgcgcaacattcataagcatcgcaaagtattccgaggaaggcacacttcaagcgcgacacaccgacgtgatcgacaaggtgattcagacgattcgcgataccgatgtgaagcagcgacgcttgctggatcgacaggtgcaacgactgcgcaaggagaggaagtggatccggaagaagtattcgcggctggctgtgcaggcggatgggctgggtcgcgcctaccagatgaagatgcggaaattgagaatctcactacaagaggcgcagggggaggtggtgcgtctacgaattgagcgggatatgttgcgagactgctttaagaagtacaatattgaggacagttattcgaatgacaatgacaatgtcgacgggaagtgtgaggttgacacgggggaggatgttgatggagaatatgagagtgcagaagaaactgtcaagggggcagacctttgatacctctcagatgtcttccaaggcgtctctgggatgtctctcggagattatttgtccgtttgagcttgcatgcgaaaccgttttcatatttcctttgtctggccctgggttttaggggagaagagatctgcctcctatttcgaaaaatgacgccacggcgaagacaatcatgttcattctgagacttggcttcgtcaattttcccacatgacagcagtacaaaatcaagaagcaagttctatcaaaaaagactctcatttcaactgcgtttgaaaataccacagtaatggatgtaagcatcggatttgcctatcaatattagtgtcatatctcaatatcggcttctgagttccgagggttggatccgcatttgatgacatctggaatgtgattctatatcctccagggcttgttccagttgaatataagacgacaatcactggaaatgggaatctcgaccatcagaaccgagagaaccagacgtcggaacttgcaaatcgaaatcacagccgatcatgagcaagtcaacggtcgtccaaatcctacctcggcatcttcaataggcgcaccctgattcggcccgcggatccaccgacttccatgtggaaagtccggggggctctttttttctgttcgtttctccttcttttcggttctttttctcttttctctccctgatcaaaatcctcttacttaaaactcttcgaatcacctcgaagacgacgttgagtttgtccaatttcttcccgataaacataccccggaccgcgttatcggccgatacccagaatgagcacccacgactatgacgccgtccgcaaggacatcgccgatatcctgcagaagcccggctatgatgatggcagcgcaggacccgtcttcgtgcggctagcatggtaagtaaatgtgatcaagcctcatcgtttcccggtcggggacctcggctcatcggggacgataagcctcgcaatcttactgacaatgatttcaaacaggcactcatctggcacgtacgatgttgaatccgacaccggtggctcaaacggagccggcatgcggtacgaagcagagggtggcgatcccgccaacgctggtctgcagcacggacgggcattcctagagccgattaaagagaagcacccctggatcacatactcggatctctggacgttggccggagtagtggcgatcaaggagctgggcggaccggatatcccctggcaaggtggacgaacagatttgataaacgacaccaagctgcctccacgaggacgtctgccagatggagcccaaggtgccgaccacctgcggttcatcttctaccgcatgggattcaacgaccaggagattgtagcgctgacgggcggacacaacctgggccgatgccacggcgaccgcagtggattcgagggcccgtgggttacgaacccgacccgattctcaaactctttcttcaaattgctgctccagcttgactggcaacctcgcaaggtggcgtcgggtaatacccagtttgtgtacgtggaccccgatgcggatgaggacgaggagccgttgatgatgctgcccactgatatggcgctcatgacggatcctgcatttgccccgtgggttaagcggtacgccaaggataaggagttgttctttgatcacttctccaaggtgtttgccaagttgattgaactgggcatccggcgtgatgctcagggtgccgtgaccaacactgacggcactctcggtggatatgtgtcagcgccgaagaagagcaacactgccacaggcccgcccagggcacgtctgtagggttttattttttggctttgtttttggcttgtttttgatcaattccccactgcgttggttgatccgggactgcagactgcaggattcggatgtgtaaatagatcctagatcatagaatgtgatgaagataactgatggatgcctgttgatatgtatcgtcgtagtatcttcgtagtggaattataaggatgaaatagaaagaagagagaaaggggaatgttgaagtctggggtaagattgcggggaagcccacacggctatatctgaataatactacatatacagactggtatgggcatatacgatgtagacttattattatgtagtaaagaagtacttatgactgtaaaaaggcactagaaaggtaccaagcgtgtaatatctcgtgttatacaaagtcgggcctcgggtatatcaaatgagagcccgctgattggcagatgccgtgttgactagtatcaacggtgtatattaggaaatataaaagaacaaaagagtacaataagtcacataaatcacataaatcacataaatcaaggcaaatctgcatcatctgcatcactgtcaccaggcttccatgttggatcggtgttcttcttcctcgaattcctcaatcctggtcttcttgataccttcggcctctcctctcgctgtttcttctgttcttccttttctctttgctgtttatactgttcctctttagtccagctcgagtctttctcccgtaattcacctttattttgttgttttttctttggatcgagctctttctgctcttgctttttccgtccctctcttctttttcgatcgtggccctgtttcttttgcatattctctcgatcgagttcctcctcttcttcctcgtcttctacgtcactaaatctctggcttgagttgaattcacctgcacgtagggcctgcttctcccttggactcagggcctgcttcgaaatagcgtagtttgtcatcgccgacctcttgagctcattaccgtgagtaatgcggaaatgtcgatttcgaagctcaggaatagtctccgcatctggcatgctaatatctgacgacccagtgcccctgcgattgcccagctggggtgacataggcagatcagggaagtccaaagctccttcctcactaggtagacccgaaggccacatgtcaggatgttgaagccagcgtggactctgcatcatcgactggaatatatggttcttgggatccacatttattatgccttgaccattgctcgataggtcatgaaggcctgtcatgtccataaacgaggacaactcgaactctggagctgtggtggtggaataaaggtccggatcaaggagtgattggtcgatgaccagtggatcaagaagcgccgaatcaatgtgaccaagtggcagagcggatatggcagtctctccggcggctgggttgggggatacttttgctgttgcccagccgggattgaaattgctgaagcgctcaccattgtatgatagtatacgaggccatgactcccgctgcggtggaggatccgatcgctcccaagggatgtgttcttcgaaaacgctcttgttctcgctcacgcaattggccatctctatcaacgtgttgttggccttgtgcaaaagttcgatggtgggattcatgattcgctcgtagaaaaggagcggaatggcataatggttgacccattcagtgggcactttttcgtcaggctgaaatgctgggattccaccgatgagaaccccagagttgacttggctgtcgtacatcataatattcccattatctttctcgcctcgtttcgtatctgtccagaataaacgagcatgggattcgttgttatagattccaccaatccaacgatagtgtgcaacctgtggcttgtcttcatagtctatgtaattgaatttgagattctctgtgtgatttcggattcgagtcttgatatcagaggttaccacaagacgcagagggagttgaccgatctttcgttctccagtaactcccgtcggatcaccacacttatcacacttgaaagatttgcgtgggtagaaacatcgctcgatcaactcttgcaactctactcctttttcatcgcccgtttggtagccaggtagaatgcaggacccttggtgggagttgtagaatggcattgcacactgacatttgcaaggggtcactcgttccacgtggaaatagcgaaattgagcgaagcttctcgtggccactgaccataccgcccaaggaggaatcggttgtcccattttcaagccggttgagctatcggaaaacatacggagccactcgtcacgcacaaatatagaagttttatcgtcgaaggtctcccaactcgccattatcacttcgatgaatgctttttcgatatctttgaactcagctgctcgattgtttgcacgatctatcttggtacagccagcatcgagtagcattcccgctacaataacagcatctgttgcacaagacattgaatcccagatagggccgcggccccggaccggatatatagtgccattcggatcccaatcaaaggtcaatggggacaacttgacacttgccgtggtggggaatgacccaagtttcatcgtgagcatatccttgtaagaataggctgtcccgtggcgaataggtttcccagtagacggaatgctgggatcacggtccaaatctgcatacacgatctgcatcacagttcgttccatggcgtctgtaatcgcttgcgtgtcaagcgggatggaagctttcgggacaatggggctcagttggtgccttccaattggggtcactttatcggaaggtgccagagcaggcgtccaggtgaaagttgtgatttcatcagcagcaaagacaggctcttggtatgccgaagtggggtaatgaaagtgatctctgtcagcaggagcaccgggtgaaatttgtcttgcgcgcttgctacggggttcctcgttgtcctctgcactccgtttttgacctggtgcagggcccggtatcttctgactcggcgcttcggtcaataaataggccggtgtaatctcgactcctgggttcatgtgttgcaacaagctcatacgaaggatttcctcctgttgcacagcgagtgttgacgctggagatggtggaggtggtgtgtgtaagctgtcgacggagtacataaactgttgaataagatagtcgggcatatctggtggcgcatcctgagggcgtatgtatgcattcaagataactgtgttcacatccgggagagaattgtaccacctactgaatggctttgggcgcggatcgaggtcgtatctcaagagtcgtggcccagtatctcggttaacatcgagcatatctgcccaagtcttcggacgatggcgttcttgcatgtagtagatgagcttgaacaaaaacatatgttggagcttgacatttgacttctttctcattgtcatgggagtcttagtcggttcctcatagtggattccccagaagtaatgcttcatcaacacttgcacctgcggggccttcaaggaacgactggaaccatgtgcaacagatgaaaacttggtattgaaatgtgaccagtcgtcgggtgggttaggaaggcgtgtaaagtcgtaaagtggtaagggtggaggcggctgttcgagctcctgcggcctcaatgggaaatcggaaaagagaggaatctcgagcggggagaaattactcatctcgacaatctgaaagtgaagaatcaaagtctgaaaagtataccacgacgggctcaatcgagagcaatatcctgatattggggtgtcctatattggtctgaggaatttggaaactatcaactagaggccaaaacgaggaaaaccaagtgctttaatggacaacgaggaacatccattgtccaatgtgccggcatgaatgccatatttatcaaggaaagaaatagagtgccatattgtagacggtaagcatgagatgaaagaacacatcgagcctctccccgaatcgaaaacccatggtaacatcctctttcttgatgaacaaagcacttagaatcgaggcaagagttagcaccagggcagcatgagagtggggaattctatatttgtcacactagcacatagcgtcttggtcgaggtcaatcaaagaacctagtaaaaatagaaagtaatactattaatggcagtgggattatggggatctcttaacaaaccaaagaacataacttatcaaatcgaagatcctatagattggggttccagatccagtgcaggtaatggatgttgtggcatgttgatctcttgtttggccttgagtaaacctcactgggtctagaaataaccatcaaagtgcagaagtgattagtatcgagctagagatatcgaacttcataaagcaagtgaatcggagcttctggcatcgtccgccacgaataaagatatgagctaaagcatgtacgggcctgcgggtagccaatccatagacttaagaaacgcgaaataaaaacttaaatcaaagagatgacagtgccacaaagtaaaccaatgtatgaacctcatgaagggttactcgaagcacaaagagacactttgacagtggctgatcactccaggaattgggttcgtcactgtttcatgtcgaggaaaacaaagccgtctggtcagggctgcaggtaaaatacgtgtaaataacacggcagattacccgaatgtaacaccgaaattaacagtcatgtgactgcacatgatctacattacgcactagccatattgggcctagtcccgaacaagcgagccctcgtccaaatcgggttagtgctccaattacccgatcccacaagcaaagtcactcagttggacttcctctctccatccctctgtcgacaacccatcgcgatcctcgcccatcgcccatcatgtgtacgtgacgaccccttctttcagtccgagagcattatatgatatacaaccacgaaattgccaaaaaaaagaaatgctggaaacgactgcagagatggcagttctcgaaattgaatgttggctaacatggcggtttctcgataacagcgctcgtgaccggcgataagacgaacttccagttcatcttgcgtctgctcaacaccaatgttgacggcaagcagaagatcatgtacgcgctgacccagatcaagggtgtcggtcgccgttactccaacctggtctgcaagaaggccgatgtcgacctcaccaagcggtacgttcgccacaatccctatcgaatattcaatcattcccatgcatcatctgttattggagggaaaactcgaaagagacaatggaacagtctggaccggaatcgacctgcggactaaaaagagggggaatatcgcacaacaaacaaattttctacaagaccagcaaagctgacaaaacgccttctatagtgctggtgagctcaccaccgaagagctcgagcgcatcgtgaccatcctccagacccctacccagtacaagatcccttcgtggttcctcaacagacagcgcgacatcaccgatggcaaggacacccaggttgtttccaacggtctcgactccaagctccgtgaggatctcgagcgcctcaagaagatccgctcccaccgtggtctgcgtcactactggggcctccgtgtccgtggtcaacacaccaagaccactggccgccgcggtcgcaccgtcggtgtcagcaagaagaagggctaaatcattctgttcgcttttttgccgggggttcttggagggattccgttatttccggtgtgtttctatggacactcgtgggaccttttccccgctgtcaaaaaattgaaaatgaactataccaatgaaatgaaccgatcttttcaatacgtatgctttgcttttagccctgggtttgatgggtcatactttgtggaacaatttgccaactccatgatcctggctcaatcctcggccctcgtagggtagaatatcttgcaagcctccgtggtataattcgaagaatacctttctgtgggggtagaaagtcctagaccgtcggtgtgcctgagccataggtcaacaactatggggttctggggttatacctgcactcatgcatcatccatgcctacactacatgtttattactcaatgtttgagtctatccaaaatttattgaattcaaagttgcctagttatataccaaacaaaagccaaatcggtaggaaaacatagtatgcggccttctgaatttcccagagggttaggtgtcaaattgtacgcaaacagccagtggcaagatcaataacacgtagtgtaatgataagttcatcaacgcattgtatcatatagcagctcggttgagtgtttagaaccactcaccaccgagccagcggttgaagaaatcgatactagcctcaggctggtccatgggaaccatgtggccagcaccgaagatacgcatgaaggtgaagttgccatgggacttgatctgaccgatattcttgccaacgtgctcgttctgtacaatcttgaggtcctcaagcttggcggcagcgaactccttctggccaggccactcaagagcctcggaccaggccttgttgccaagccagttgcagatgaagtcagcatcaccagcgtagatcagaacagggatctgctcaaggagaccgggcacgaggcggtggtaaggcttgaaccaatcgccgttgaagaggaagttacggttaatgtcgaagttgcatgagtcgtagccatcgacctcagcaccgacggcctcacgcacgctctcctgaccgaggtactcgctgacgtagcccatacccttgtagcacaggttgctctcgtcctcacacttgccgcgaatatcgtaaacattctggccggtgcgctggtagggaccaagcatggcgttgttgcagtagatggaggccgggacacaaacccaggggctctcgctgttgtagcaggactgaatcatgctttggcagcgggccagggagttatccatggactggcaggtgctctcatccagaacagcggggtagccaccctcgccgcatgccatagggcggtagtactcgtactgagtaagaccgtcggtgagaccgttaccaatgagaacagacttgaggttgatgttacgcttcttgtgggagagaatctccgaagccatgacaggaatatagtggccagcgtaagattcgccagcaatgtggaagtcctgtacagcgtactcggggaattgcttgaagaacaatgtgaggagggcatagacgtccttgccagcagcaacagtgtcactgacagaggagccactgtaggagtagccgacattgatgggctggtccaggaagatcacagaggcattgttgttccacgagaaatcattgtaaataggcttgatatcagcaccgatagagctgggtccaagttccaagaaaagtccggtgagagacgagcagccgggaccgccgttcagccacaggataacggggtcgttcttggggtcattgcgagactcgaagaaccctttcggaggttagatcaactttagatgatgaatggaggctttccgaacttacagtagaacaagtgcttgtcattctcgttgtcatccaggtaaccactgtactgcttcacaccggggtcgatgccgagagcgctggggtcaaccttcttggcacggaggctgtagtcctccagcttgccctcaacctcacgctccttgacgccctcggcattagagacccagatgtcttggacttcagcgccactgacatggtaatcccagtgcgagtcagggcggcgggtgtgcttcttgggcagggaaagcaagggagcgctctccatggactcggggaagtagttagacacttcctcccagagctgacgagcctcaccagaaagagacttgaactggtcctggaggtgctgcaggggcttgagtgcatccgcaccctgttgggctacgttctccgcatactccctgtgagctccgaggacctgctggaagggcggagcagcggccgaagcagctcccaccaagagagtggcggacaggactctcattgtgtactgtgtttggatttcacagcaagaatgatggtaatgagctggtgatgatgaacgggtaccttggggtctggagttaggcacctcttatcagtaaccgttgggagaatggctctcaaaatgagccaaaggaagttgatcacttacaatttgaagataccacaagatgattgataattgagacaaagttgaagggttggaagaagcaagacggtgatgccttggggcttgtgagatgaggagaagcaggtcccttggccgatgacgccggggacagtcgataagacgagagggctgggccaatcagatgaccccaggaagctgcccgaccccatgacccggatgagtcagcgtgagtcacgggattccaaggctacgaggggcacgagcttttcgactaagcctttttgggtaaattgcctgacgcaaatcaacttttgatacttcggactcagtctacatatatccttcgatcttgacggtgccatccacttggaaacagtattcaaaaatatatcttgaatcttactacattttctggtgtctgttttttctcttactgaagcaaccagccctcagcggctttcacacccaaaatgcctatcaaccaaccctccaaccagatcaaattcaccaatgtatcggtggtccgactaaagaagggtacacttctatcttacctatgttccttggacgtttctaaccttttatcctaatccaggcaagaagcgctttgaactcgcctgttacaagaacaaactgctggaataccgatccggcgccgaaaaagatctcgacaatgtcctccaagtcccaaccgtgttcctctccgtctccaaagcacaaacagccccaacagcagagctagcaaaggccttcgggaccggtaccccacgagaggaaatcctccaagagatcctccgtaaaggcgaagtgcaagtcggcgagcgtgagcgcaaagacatcctcgagcgagtggagaaggaagtgctggatatcgtgtcaggtcgactagtcgacccctcaaccaagcgcgtgtacacctctggaatgatccacaaagcgttggatcaattaacctcggccagcggacaacaacaggcacattcgagcggggaggtgaatggagatggcgaggagaaaccctctcagccgaagaagccgctctggacgggagtttcggcgaaccgctcggcgaagagtcaagcgttggatgccatgaaggctctcatcgcctggcagccgatccccgttatgcgagcccgcatgcgtcttcgtgtgacatgtccagtgtccctgctgaagcagtctgtcaaggctgccccaggtgcagcatcgaataaggagaaggaagccccatctagtggctcaaagaacaacaagaaagggaataagggatcgaagaaatctaagaaggacgattcagatattgaggctggtcagtctgatgtggaagcacccaaggccccgggcaccgtcaaggacaaaatcatggcgttcatcgaatcagttgaatcgcaagaagtcattggcggggatgagtgggaaattgttgggtttgctgaacccggtgcgttcaagggattgaacgagttggtgagcaatgaaacccgcggaagaggccgggttgaggttctggacatgtcggtcacacatgaggattgaattatgacgtttgatttctctaaggctttactgtacatgatacgatatgactgatgacaaaaagtaaaaagaaccttgaaatatactggatttgatatgccatcacattctgccgcagtaaggggaatacaatgccgatgaccaaagtcttttctcacggaaaaagcaaagatgaagaaatgacagtcgaacaatggagacatactgcggggaaggaacacatactgcagctgccagcagctcgtaaaaacagccactcaacgtaggagagtatctttgcaaaaagaaagaaaagggccaggatctcaagtatgatagctcaaagtataatcaacagccctgaagcggcgtatcattgactcgcaacaagaaattaagtaacaatatgatacaagaacacgtctaggatatagacaaaggagagtagaaaccccaacaccgtgagaattgcttattcccaacaaaaagaaaaaagcaatcactgatcatcgcaacgttcgagccaatcagacatcttcaggtacgccgatcttgtcacatccagtcaccagtaaaaccacattcttgcccgggccaagttctctagcgagatccagtgtcttggctactgcatgactcgagtcaagaccgggcaaaatgccctcgtggcgctgaaggattctaaacccatccagggcaaccgcgtccgtagcagttgagatttcaatccggccagagtccttccaatgggcgacctcggggcccacagtagacaagttcatgtcaggtgaaatggaatgcgaatcaagtatttggccatcgtcgttttggagcaggagagtgcgggcaccttgtagtaccccaagtcctccatctgtcagggtagctgccttcgcggcttccacaccaatcagacgaatatatgagtcatggaggaacggtctgaagagaccgattgcaccgctaccactgccgacggcggtgacgagggcatctgggtgacaacctactgcctcgtgcatttgggctgcaacctcctcgcctagaagggcttggaacgtgcgagccagagtcggcaggggactaggccccaccgggctacccatgaggtaatatgcagattcgtgattgcagaccgcataccgcagggcttctgtgatggctgcgcgtagactacccatgccggagggggtgcgggccgtcaggaccttagcaccgagcgatttcatctcgagcacgtcctcttcctgggcactagcgtcgtctgcaccaatgacaaccacacatcgtaatcccagacgcgcgcacattgcagcagtgaatttgccatgcttggccgaggcacaatctgtgacgatctcagagcggcccattcggcgagctagcaggacctggccaattatgttgcgggttttgtgactaccatattcatttttgtcctcacgcttcagccagatagtagcacctcctgctaaattggtcaagttcccagccatgtgcagtggtgtggcacgagcacgttgaaacgtggcatattcttcccagaacgaagggtctgagacagcggcctcgaagaatgatgtcagctcgtataggaatcccattatggattcaggagcaaaccggcccccgtaggagccatagccatcaaaggtgatctgcggggcccgcagagtgccatctgactgcaggatgggggtatacgctgtgattgtgttcaatctcgatgtggagatagacttggcaggtgtatcggggagcgtggatgtggttccggtgacagttgatactgtcgttgctctggtttcgctatctgaggcatttgtcgactcggtttgtgtgctactatcacaactcgagggggaaaccgaacggtttctggactgtacactgctaaccccttccgggcagggattagcaattcgtgcttgagcaatcgttctgccagcaggtctcaagtgaatgagatcttccacattgtccgtgccatgtgttgcgagatcagtgggatcagctgatttgggagaggaaaagcaaagaaaacggcgcagagagcgaagcatgttgtgctttacccttcggataaaagtagaagctggattgatgttttagtaagtgattgacaaataatcatagagccataaaaaataaagagaatggatttgaggttcgactattcagatcattcagatagaagttagggcacggtacagtgggcgaaaggtgcattaagtatgcatttagatatagtgtgaacgttcctgccttatgtcgacctttcagctcgtcaggcgaatgaatcggaaagttcgatctcggattgcctttcttggccgactaggttatctgaccggctcttctacttctttcacttatgagtggagtacatatggcccgtattgtgaggttacgtagtggagcggtagaaaagtatgaacaaatataaccgagtgccaatgtcattgaatctattcagatggagtatatagtggaagatttgcctcattcctgtatatcatagaactatgtagactcggagaaaaggtatccatatagttctggttccccgagttaaacagcttcctatttgattgctttgtctgaaagattgctatccagaacttagcaaccaggttaaatactctgtacatacagggtaccgagaacttcaaacatcattccaaataagcaaaatccttctatttgcaatgaaccgcggcagtgccagcagtgtgactcaagcccaacgccaatgatgtgatcaagcctgacctagtatgatcagattccacatcttaatcgaggcgtgcaactgtacagggatgtagctcttaaaagatcaatgaaattggggcctccagggcagaatctcatatatgctgtgttacaacacccgcactcccagaatagtcttgtctgtttcacaaagtgagccttatctcaggtcaaatctaaatccacagcatgtaacattccagacaccgctccacgtgtaccgtttctcggtcctacattcaaatgactcggttcatataaaatgaggcattttacattctatggagtacagggctctgatctaagagacaaagacaaaatttgactacacttacgcccggaactgtccccggacatatgtcttttccccatcgatgagatgctcctatgccctcaattggcatatggatcggattcattcaaagatctctttcagccatatcttccattcaacaacacatccttttggaaatatttcaaagacaagctttcaacttttcagctaggacttcggaaattattgggaaatttactactctcaataaaaatggaatccactagctagtagctttatcgttggcatattgctttttgttctatgtgatccgatcctcgccatcacagcatgccaagcttacgcttattgattgatatcgatggtctaccaaactgaactgattccctagattcctgtactctacattgctcatgtgaataattcatagatcgacctagggcgaagctgatcatgtgatatacttaataggatgaacttcaaccaatgagtactcatcaaagaatttcttttcctttttcttcgttattgctttcttcgttattgctttcttctgatgtattattttatagagagctattggaactagccaaaaataaggttgtagaatttctatggtcggaatgtggattataatgtggatacagggatacttgggacgaatacttctggtacaaactcgaattagcaaaagcttcattaaacagtatgatgtattaatgcaagtcgcattaatacatgtaggtactagaagacactgcatcgaaaccatggactcaaggctcagtatggacaacaagcttcattaatacatatcaaggcctctgcatctacattttagagtgggaaacatggcgaggagagcgaaagcactgaagcattcaagcatatatcatacaggagccaattctcaaattttccattactatttcagtggatcctataacgaagaaaatctgcagttgtattgctacattacaccaaggggaaaagctgatactcaaaggctgatcattgatttgagcgtcaaaagttatacgtcagtcaagcgtcaaagaaacctttctaaccgttgctctctagattcaggatctcgatgagcgtttgatactgccggtcaagagattacgatcgcctgcacccgctccagctcttagactaatgtgttcttggtccaattgtttatcactttgacatgcattttaatcagaaaaaatcgtatattctacctaattcctatatgacttagctcctcaatgataaatcagttgatgatgattcataaagcagttcaaacgtcatatgatacaagtaacttaattttactaggagtttacatagaagttgcaggtatctactgtcttgtatttggagtttgaaacgaaagcggtgtctaaaactgtaaggcggtataggaagcggcagtaggcacaatccaaattaggaaggcggcgactgaattttcaggcaggatgggtcatatcaacacccataatattctatcacctcacctacttcattcgacaatctccacgaaaacggatatcacgaaaacgaatatattcgcggaaacgagcgtgtccgtgaaagtgagcatgcctatgaaaatgaaaatatccgcggtaactgcgtaaccgcgtacgccaacccccagactatataatatgctcttggtctacttctctaccacctcatctgcttcattcgataatgtccgctaaaacgagcatgtctgtgaaaacgagcatgtccgccaaaccgagggtgtccgccaagtgtccgccaaaatgaatatatccgcggcaactgcgtaaccgcgcacgccaacccgcagactataaaatatgttctcagtctacttccctactacttcacctgtttcattcgaaaacgtccgcggaaacgagtacgttcccgagaacgagcatacgcaatgaacaagtccgcgaaaacgaaaacgagcagtgtccgcgaaagaaagcatatccgtgaaaacgagcatatttgcaaaagcaagcaaattcgcgaaaagtggttcccggaagttcatcaccattgtatttcgcggatatcaccccgcgctaaagattatggaccgagcaatcctagccagagcaggaaagcatcctggaaacattccacgcctaactcataggtcggagagagggacgggcgagcaactggtaaattcactggatcctttgttcaaaggagttgctttctatggatattgagtactacaacaacgaccatcgctgcctcggtatgccttgtctcattgtcggaacgtgcgagatgatgctggagtacgcgcaagctcgtccagcaacgtggaggatgatactttggaattgaaataccgatgtcgggattgagagaacagaatgagcaagatggttctgcctttcatcgaggcatctctaacaacacggtctttatgacgcttagattcaaaatcttgtcccagattattcaagtttcaagcatgacgtccttgatcttcctaataacctcacacaagagtagaagcaaacttggaaacattgtctgttttcagcgacgtagatatcgaagtctgtgaatggatccccccgccaccccgatccaggcctgggtgacccgcggtcgacctgtgtagggcaacgaatagggcattgtgtattactctctaagtatttctcattcttagcgtatatatataggattgatctggaatccacaaactgtatgtccagattcaagaatatacggcaacactatagtggtattgtcgagttcctcactgtccctgccattcttcggcctattagatggaggacgtgattgggtgcaatcggaatagcatcacaagtgtaactactcgacaacgcacaagtcatccaccatacccactgaaactccatgaaaacccagccgatacgaatcacgaccagaatagagcgatgtgcgatcttggcgcgggggaaaagcttggctctaggcggggttggaagattcttctcgaacaactgcacgatcttagatctagagcgatccatctcgatcgtgcgttgtacctttttgactttaattgatttacgagagttatagttcaaaaaagcagagaaattgagttctagtaaggttatctccagcagcgttaaaattttctctagaccatctatgagagacattcgcgacgtgtatatcgtgataagagagcaatggctcgcgaagacaggggtggatgggttaaacccacccaaagcaaaaccgacagatcccaccgaaaaagggaaaaaaaaaagcaaaaatcaaaaatcaaacagccaaaatccgtaacgggtatacgcttagatgcaaatgcatgacaggtaaaaaaggaaagacagtcgctgaccgacagtcctcgacatctagtgaggagtgactcggtcgacgatggggttcagggatggagatgcccgatcggcaaagccaaaaaaggtcgagtaaataagagacatcaagtcttgaggaatggaagggatgattcaaaaggaacaatctcctggatatgaagaaagtagggcgatattcaggcgcagacctggatagcgatcagggcacgggcgagatcctctggggcaaaagggaggtccttccgggcggacatgacgcacggggtcatggcaggcgagatagcccggacgagaggtgatgaatagcggacggactccttgaggaagaacttgggctctctgacatcctctgggatctcgtagatggagccctcgttggtgagggtcatcattgagccattgtagctggaggagttgacgatggtggaagactgggagccggagttgggggcgcgtggcgaagattctgcagggacctcaggaagggcatcgactatgagatagaagttagaattaattttttctaatagggctgggtgatttcgattagggctggggatgcgtacctggatcgacattgtccggggacaccgaaaagtcagtatcggaagggccggagtagccgtcagacacttcaaaagtggtacaaggtgagacggagtcgtcgaatgaacgagtccgttcgaccattgcaccctggaaggaccaagcggctaggctcttctggtgggcacgatcgaaaggaccacggaatttggacgggggacactcgtgtcgcctatagtattcgaccttgggctttccatcatttttggatctggagcggaacacccgcttgaccttctcgcggaagttcatattggaagaaaaaaagaattgggaactgggtattcaagatttcaaattcaagaagttcagagatcaatgcgggcggttcctaaggaaaatgcctcagaggtgcataccactcccggattgggaacggacgcggtgggtgtgcaagcacgaatagcgggggttgtgtgagagaaacagtttaaccattctatgaagatatagagacagggaaagggaaagtaaagcaaagggaaaaaaaggaaagtgaaagaggggagagagagggaaatgcgggaattatagtcgcaggcttatctttgccgttgcatccacgttcatgtcccaggtgggatggatgtcccggttccccagaagcgtctcctgtccagatgcggtatattggggggcaatggtccgtacggagtaataatggtggaatccactgtctgtgcgagagacatcattatctgctaattggtttggtacggggtattctatattcgaatgttctatatagttagggggatgttgtactccgtacacaactagttactccatactctaggtaagcgatttaatccccgattaattggtccgagaaatagccgagtctgggctgcgattctgcgaatgtcacggttactgctacactttagggctacccagcatacttacttctgacccccggtgtatatccccatggatgtatgtcgtaaatcaagtataatggaactggtcattccttgaagtcagtggcgtatattgtactgcagcgaaggcttccagaactcggtgagagcctcacggttacatcatgttacattttgcatgttgtaagaggatgtgtcatggaatctcaactgggcgcaggaataaaccggaatcggagtggagatgaacttgcgcagttgcccccactcggcacgtttttgccgggcttgcctgggaggcagcgctggctcataaagcacattaatttccatttcacaacgaggccggctggcccaatggcaaggcgcttgactacgaatcaagagattgcaggttcgatccctgcgtcggtcagtttttttcttttgttcaatttatatattttgtataacgtagttagataactagttaaacagtctgtttctgttgtcatttatctcttttttaaaatagttatacagtgtagatgtagagattacattggccttgattactagtttaggagagctgctcactcaactagtaattaccaagttgggtaactcttgaacgtttatgcatgtcatacaacccacccgtaactggcatattcacatctagtgggggtaccctttctgactcttccaagccatggaacttccatttactcatttcctattttgtgactgctatttttgtctttattgggatctgctgtttcagagatgatgtaatcgctatttggccctttcaccaagaatgcccaatccctgaggaactcagggactcaggaatattggcacacatactaagttaggctttgcgcctttccccagatcatccttgagccccctgattaccttgattgccctgactgctctgattgccctggtcggcccctagttgtgcaggcacaaccctatttacccgatgcagacgttagggctggcccaagctcacacgacaagggaactatgaaagagatgtcgcatgcggaggaatgcagagggaaagaggacaaaaagagacagacagacatagaagagagtcttccaatttgaattgaattgaatgcattgggatctaataatagttatgaatccgtagggaaaaaagagattaaatttgtgatactttgtgttccagaattgtcctcaccacggatccaacaaccctagagaagagaacataccgcgtcatcccttacttgacttcttccctcctacacttcactaccatcgtaagttgacttatctttccttcatcttccatcttctgaccagcgcagaatcaatacaatcaccatgggtaaaaaaagcggaaagaagaacaagaagggcagcaagcccgtcgcggccgtagagagcgccaaggacgtggtgtaagttgaaaaattcaacatgatgccacatcaccatctaaccgttcagtgaacccgagcaaaccgaaggccagactgcgaccgaacagactgcgcccgagactgcgacacagcctaccgagaccgtcgcggagcctagcaaggcgcccgaggccacccccgtgaccgaggccgcaacggagatcccagctgtcgcagagaccaaggatctggagaccaaggaggctgtgaaggccgagcaggctcccgcgacagagggtacggtggaggagaccgtggagaaagtgcaggcctccaaggccgggcagttgggcgagctggacgatggcgctaccgcaggcactggtatgacggcgtgttagtaatatgcgatgaattccgactaacctgaaatctgcagtccttccggagacgatcactagggagcccgcttccttggacgtcctgatcggcgctcctgcgacactggtcgagcgccccaagacctcagactcaaacgcccccgctgtcgctgcgcccgtgcctattgccgccccggccgagaccgacgccgcccacacgaagcgcccgtacgagaagcccatcttcaccaacgaggataacttgaagccccacaagatgcccaagaccgacgaggaggcgattcaggctagcgtggcggaggacaagaagaccattgagaccttggccggtgttggaccggctacggctgctgcgttgaccacccctgagcctgagcctgttcaggctgaggcacccaaggctgttgtggaacagaaggagactcctgtggttgttgaggcacccaaagtcgaggagaagaaggtggaggcacccaaggtcgcagaggagaagaaggtcgaggcacccaaggctgttgtggagcagaaggagactcctgtggttgttgaggcacccaaagtcgaggagaagaaggcggaggcacctaagaaggttgaggagaagaaggttgaggagaagaaggctgaggagaagaaggctgaggagaagatccccgtgtccactcacaagaccacccctgctcaggccggcgccccctcctctcccgtagcggtcgccgccgcgaacgctgccattctcgcttccaagggcgacaaggctgctgctccggccgccactccagttgtttccaaggaggccgagcccaagaagcccgaagctgccctgaagcgtggcgacgaggcacagcctgaggaggcgttgcccaaggccgaggagcctaagcccgagaccaagaccgaagctgtcaaggaggaggctgccaaggcccagcaagatactcacaagacctccgagtcaggatcgcaggccgagaagaagaagggcgggttcatgtcctggctgaagcgcaagttcaaataagtaaagtaattgtggagtgcgagagcctgtgtatgatcagtattgtacgctaggtggggatgttggggaggggggcttgcaacctacgtcaggctgccttggttttgtttttctttcttttgtcagctttgatgatacacccgttgaaattatatatcagatcagaattatagtgcttattatggtgtcttgccttggagtgaatgtagaaggaatattgtttcaagttgacttcgagtcgggcttggtgtcctcatgtagttactccgtacaccgctagtcaaatcaattctccaggtatttcccttccccctggcgaatcaatattccaatattccaagctcgtcattagcaggagcccactggttgcaaccaatgaaaacgacatcgcaacgcaacgtgaacactatctctcagtggagacactatatcaaataaatctacgactagtgggccagcggagtcgatccaataatagtttctccgcttctattcttgcttgtgggtatacactagttgtatagaaatgattagtatcgttatacaatgcttgaccatttcgagatcgacttaccaggtcgcgttcattataggtattggtgtcatgttctgcagcatgacgcagttggtagttcgttcttctggtacaattatcaacattggaaactccagcgctctgttttagacgtaacatacctttacccaagacaatatagttaccgggattcattggcattagttgctgtgtcggcatcgaggcacttgaagatttccctccttgaaatgaaaaagaagaatatgaacgagtagtagcaatacagcatctcggcagatatatatcgagcctactatagaccaaacctggaagcatcactatgtggaggaagtggtaaaagtatgcgagacccttgcaggctgggaaagacctatgtttggtggtgtggacggaaaatacatgcctgaaaattatctcaccaacctctacaatcgggactttcgccctcaagaacttaccgaaaattgtcaaatgctgggtatggattgctcgacattcgtcttctaccatgccgatctcggtccagtaaacatcattgtggaagatataccgaaagctggtactattgggatcattgattgggagattgctggttatgtcccaaaaggatggatacgaaccaagttccggttgtctagtggactggatcttcccgacgcgagccccggcgaggagtcatattggtggaggtcggaggttcagaaattactagaaaaacgtggattcgtggaccatgcgaaagaatggacggcatggcgtcgaaataaacctatttcgcagacgaattagtggcgtggaaagtctgtagtggcggtatgatacgatgctcaatgtatgtgaggcgccaggtcgatctgaagaatagaaagagtgcattcaactaattaactgagatgaagaaagaaaaaagaagcaggttgcaaggtggaagcagcctgttgatatagctgaccctttgcaaacgttgcaaacctcgaaccttcttgcttagcgatctagcaaacaatctatctagcaaacaatgcaaacagcagatagtcgccaatccgtagagtcatagaacgggcagtcatgcagatggtaacagaataggactagattccacatctccatgcggggtccccgcagattatgtgcccgcttacaatatttcgggcctcggtaacctgggaagagcataaaactagttgattgatgaaattctacatccttcactcgcataacacctccaattcttcaagatgacatcccttccacgtaaactatggcagcacccagccccagagtcgacccaaatgggccacttccagcgcgacctagagcaatccaccggacgcaagttcgacgtgagtgaatttcgcctgtctaacgataatatccacctaacatctcccagtctttccatgatatgtacctgtattcaatcaagaaccgctcggcattctgggaattctgctggaaatacttccaactgattcacgagggctcctacacaacggtagtcgatgagtccgtgcgaatggacagcgtacctgaatggttcgccggtgtgcgtctgaacttcgctgagaacctgcttttctcgcgcgttgctggcggcaagacagataaggaggacgacaagatcgccgttagtgaagtccgcgaaggcgctgcccatgaggttgtccacctcacctggggtgagctccgacgacggactggagcgctggttcaggctatgaaagctcatggggtcattcggggtgatcgcattgctctctgcgcggcgaatagtattgatacactgcttgtacttctggcatcgacggctctgggagctatcttctcgtccagttccacggatatgggtactaagggtgtcttggatagactgcagcagataaagccgcgctggctgtttatggacgacatggcggtttataatggcaagaccattgacctgcgatcgaagatcggggaaattgttcaaggcatggcatctgatcctggattcgagggagtcgtctcaatacctcggttctcttcgcagccggccgatatcagttccatccctaagaccaagcctctggcggagtttcttgcaaaggcaggcggcaacgagagacttgaatttgaaagagttggattccgtgatcctttcttggtggtttactcgtctggcacgacaggacagccgaagtgtattgtccattccgtgggcggcgtgctgctaaactcgaccaaggagggcagattgcataacgatctcgggcctgattgtgtcggcttgcaatacacgaccactggatggattatgtatgtgggttccgtgaagacgttgctctttggggctcgggtggtgctgtatgatggaagtccatttattccaagtatcactgcgttggtcgatcttgcagcgcaggaaaagtaagttgttgacatccacagatgtacatttacagttatcggctaatcaattgcagggtgacccaccttggaatctcaccccgatggctgcatgagttacaacaggctaagatcaaaccccgcgagaacgtcgatctcagctctttacgggttgtcacaagcactggaatggtcctgcgagatggattgtttgagtggttctacgacgaagggttcccatcccatgctcgcctgaataatatttctggcggcactgatatcgcaggatgcttcggaaccggcaaccctcttgtccccttgtatgttggcgggtgcgccggatgtagcctgggcattcccgtggaagtctacgactctacgattgacggcggcgacggaatcaaaggtgtacccgttgaggagggtgttccgggcgaattggtcgccacctctgcttttcccaacatgcccacactgttgtggggtgacgatagcggtgagaagtaccacgatgcgtatttcgggcgattcgatagtgagcgccattcacccctccatgtgcgtaggactacagtcactaaatctgtacagatgtgtggacccacggcgatttcgtctccatccatccaatcacaaaacaaatcgtgtttcacggacgcgcggatggagtgctcaacccctcgggagtgcggtttggatcggccgagatctaccgggtgctcgagggtcaattttcgaaagagatagcggactccatctgcgtagggcagcgacgaccaacggatacggacgagcgagtgatgctctttttgctcatgagatcaggggtagcattcacatcggatctggttgcacgagtcaagaacgcgattcggacagagctcagcccccgccatgtgccgatgttcacctttgagacacctgagattccggtacgtactttcatagggaagaaaagatctacaaaagcgggactgacccagaacatcgtcacagaccacggtcaatctaaaaaaggtggagctccctgtgaagcagatagtctcgggaaaaatcattcagccctcgggtacactgctgaatccgaagagcttggacttttactatcaattcgccaaggtggaaactctgcgccagagtaagctctgactggacccttggcctgaggtctccataataagaggggcagaccggcttcatcgggatcgtcacttctgccaagcttttatcaagctttccagggttagcaacgggatcgcttggaagttgtgtatatgaacacgtagtcgagagaaagtaggttggaatacgtagattgaattagactggattaggtagaaatactgaagatcataagtctaaggaagaataaagtcgaagaaggacaagtagagggaagagctgagggctgatggagtgggcatccactgcgtcatcgaagcttttcgatttaccgccgacgttttgccagcgacacggagcacggagggtatttatacaattcgatacgattaattacgctcgatcgtattttactccaccgatctgccgccaaatctcttcctcacctggtaacatcgtaacctataaaagtactcccctccccgcacgtctatttaccgttctcattacttcttcaaccctctccttctcctcaatctctgctttttcttcagttctttttgacctggtctctttctctcttgttttttaccttttacctatcatcttttattcgcaattatggttcatctcgccaaagtcaagaaggacagtgagctcccctcggctcgtcaatttgactccattccccccatcgagacaaatgacgccgacaccaatgtctacggcactcactttgccgtggaccacatgccccagcatgaaatgccagagcgggagatgccccgccagatcgccgctcggatgatcaaggatgagctgagtctggacggtaaccctaagctcaacctcgccagtttcgtcaccacgtacatggaagaggagatcgaggagatcatgaccgactccttcagcaaaaacttcattgattacgaggagtaccctcactccgccgagatccaaaaccgatgtgtcaatatgattgctagacttttcaacattcccaccgatgccgccagtgagaacgccatgggtacttcaaccattggatcttccgaggctatcatgctgggcacactggctatgaagaagcgctggcagaacaagcgcaaggccgagggcaaggacttctcgcgccccaacattattatgaacagtgctgtccaggtctgctgggagaaggctgctcgttactttgatatcgaggagaagtacgtcttctgtaccgacacccgcttcgtcatcgatccccagcaggctgtggatctggtggatgagaacacaatcggtatctgcgccatcctgggtaccacctacaccggcgaatacgaggatgtcaaggccatcaacgatctgctggtggagcgtaacattgactgcccgatccacgtcgacgcagctagtggtggcttcgtcgctccattcaccgaccctaacctcgtctgggatttccgcctggaaaaggtggtttccatcaacgtctccggtcacaagtatggtctagtctaccccggtgtcggatgggttatctggcgcgcggtggagtatctgccccaagaattggtgttcaacatcaactacctcggagccgaccaggccagctttaccctgaacttctccaagggtgcttcccatgtcattggacaatactaccagtttatccgcctgggtaagcacggttaccgtgccatcatgaccaacctgactcgcatcagtgacttcatggcgtcagagtttgagaagttgggcatggtcatcctgagccagacgcagggcaggggcctgcccctggtggcctggcgccttcccacagaccccaatcgggtctacgatgaattcgctctggctcaccagctccgcgagcgcggctgggttgttcctgcgtacactatggcgccccacagcgagaaaatgaagatgatgcgcattgtcatccgcgaagacttcagcatgaaccgatgcgacagtttgatccaggacttcaaacttgccattgatactttggatgcaatggacaagaatatgatggccaagtacagagtgtgagtttattctgtcctaatgtttcgattttcatactaacagctccacaggcacatgaagaaccaccgcaaccaacctcgccaccagtcgcttattcaccgtcactacctggaagagaagcactcgctccagggcaaggatggcaagacacatggcgtgtgttaattccgttgtgtaactgcctactggcggtttttgaatatacgtgcaaaaggattgaattagatgggatgttgaaggtggatatgtcagtcctacacgcagagtatcttgtgtcctcactacaggatccaactcattgggttgatctcttgctgtagtatatacaccacgatattgaaatgaacaaatcgatgaacatgaggttgagactggccatggcaagttagcgcgttacaagaaacgatatagtagaccacagtcctattcgggaaatagctgtcagttacatctatcgcttgtgatgtcatgcatacgtagatttatataccaaagccctctcgtgctgcaacggatgcttgcatttcctgccattatcccctcactactcatataccatgaagcgtatctcaatcgacccgaaggatgatcccccaacccgagacctcccactggcgacttccaccccggcgcaacttcccccagccaaggcgacaaagcttcatccatccaaatcaggcgaagagaacgcaaccctgttcttcgtgggaacggccacaacgattatgtcagttcacatctagaactgtatcagtgtgtacgtgtactaaaacaaagcagagaatgggcgggaatacggattatgactgatgtcagctcttgatgggaagtcgaatgctcacagactaactgtcttagcccaacttcctccacgcaggcgaacatgtccacctcggtccaggcgtgtcaagcgagcgcctcaccaacccggccgtcgacctgcacgacctccctcggattgatcttgtccttctttcgcactatcacgagtatgtctccgagcatagaggtattgagcgatcactgataatgtcagggaccattttgataaaatggtcgaggcttcattgaggcgtgatctacccattatcacgacaacacatgggcaggagcgtctcgcttttaagaaacaggacccatttacgtctgtatgcgcgcttaaaccttttgagcagattgaggtcaatattgaaggcaccgaaggccccagacagccccgcctgcgtgtgacgggtatgccggggaagcatgtgcctcctaagcgagtggtagagaagctcaacgcgctagctaaggcggtgggtggcattttcttttctagatattcctactagatggcaatcaacctaacacagcaatagttcccaccaacgaacggctggatgctcgagctcggccacggcagctccaatgctgcagacttctcctgcggttatcgcatctacatctcgggagacactctgatggtagacgagctgcgcgaaatctccaagcgatacgcggaccaacgaatcgacctaatgctcgtccacctcggcggtacaaccattccttctcccttagtaggaagactaatggaaccgctagcgttgacagttacgatggatgcggggcagggtctgcaattgatccagctaatccaaccagacgttacgatcccgatccactatgatgattacgacgtatttgcgagtccgctagaagattttcggcgcaatgtggaggcggcggggttattgaacaaggttgtgtttttggatcgtaaggatcagtattgctttcgagttatgggatagaagtgcctaatagtaagacattgggtttttgtctgttcagctcagccctggacgcgttggtctggggctgagaagggctccatcacatatttcgactccaccattcttggcatggggaatgggacttcatacgagaattatgatttacttcgccttgagcggatcttttggggaatttgggggcagtttgtaaccgaagtatggtatgtacataataggtgacgaggctctacacatggctcgtatagtgtgtttctctatgttgtatatcgaaagtattgggtcaaaggctttctttcgaatcttcttctttgagtgttcatatattctatattgtagttagggcggatatactagagagatgatatctacacttcctaacagttaatcggcattatgtcttatatcagatactatgctattctctgtctcatatcactcatttcattcaattgctatatactctggcatcccaccaaggccatccattgtttaccctatatatagaacaacctctccaatcaccgcccgtcaacccgctagggtccaccaaatcagcctcttcccctctctccctctctcctttttctcaagatcaaaagcagtgatgcgcaacctctttaagagcaagtcgccttcgaatcggacaagtcaccattctatgcgcagcgccgaacagttggcccaccccgcgtttactccaccggaccccaacgcacccaacacggagtctgaccggcgcctttcacaattcgagtactctggttctgtacagaatcagcctcagggtttgaatcggtcgcaaagtcagcgtcaaaaacctttacgtgaccgaccgaccgtcaacgtcaccgtccccgacgactcgcgcaaaaagggccgtgtcgagcgcagcgtctctgtcaagggcaaaccaatctcacaacctacctcacctggaactttacatccagagaccttggacgagtccgacgaatttccgccacatctccggcattcctacacggagaatccctcacctgtggcgccgcaatctctcgcgtaccaaccgaaataccagggtcaacgagctccccgaccttcccatcctgctcacgtccaagacaaccccgagtggtcacagaaacctgtgcagcctgtgcaaccgctttataccaaactccagcgatccaacaccgactcaacccttgatcagtactcccgaccgtcgcccaccgatatccccgaatcaccacgatacacggaacatcttcatcggggacaggctttctctgcccaggatccggtattgaatactcggcccccatcccagcagactcacgagccgctttccccgttgcagtcccgttaccctgacgccatgcagtcttccgcgcaggcatcaaaccagggtttttatccgttggacagacaaaaatccgccggttctccgcagcagaaccggagtcggcaggggagtgtgtcaaacaacatgcctgatcccggacggagtacacccaccaaaacacaccgccgggaggagtccggggaagtggacgtgcgggcattgatccagaagcatgatgaactccgtaaggattatgattcggtcttggtttttgataaactaacaatgagcagaggccaagtattccaaggtgaaacgatactactttgagaaagatgcgcaggtgcagcatctccagaacacggtggcgcaccagcgaatggcggtgtcgcgtaccgtacttgacgataatgaatacaccagccgattccagcgcctggacggagcgattaaagacctggcattctccgtgcgcaaagattggcgcagtattccggcgtggctgaatggaatggtcactgacgatgctttgtcggtcggcacgaaagaaatgaccccggtcggacgggcagtaatcagccggtggctagtagaggaagtattccagcgatatttccatccgtgcttggatccgacatttagcgtgcagctgaagagtatcgaaatgaacctgcgacggcagcgaccgacatcggaagaagaccgcgagaatgcttccgcgagactctcctactggcgtcgcacgaccttcgacggactgggtgattccttagtcggacccgaggcccaagaacgtcgcgttgagctagtggagcatctaatcgtggagctcgctgccttcataggatcccaactgcacgaaatcgcgctgccagggctagaagcaagcgtgcgtatgattatcgagaactccgtcaacatcatcgagaaaatcccgctcgaagctcgcgatgtctgcgtcgattacttcccaccgggcatctccctcgctgagcaatacatgaaggtcgaaggccaactacccgcactgagccacccgcccccgccaccctcggacccagagcagctcgaggagcctgtcgcggcagagggagatacctcatccggctcaaccggagcggtagagagtacttcatcggcacagaaaaagtcgacgaaaaagtccatatttggcgcgttgataagccgcaagcatggcggcgagaacagtcgttcgacgccgccgcctgggccagccgaggacaagagcgagcctgcagaggtagcgccgagcgccccgcgcattcggtttgcagcgttcctggctgttgaagtgcgcggcaaggggcctgcaacggtgctgatcaagtcgcccgtgtggctggtggaataaacgtgatccatcagtgcggccggttagattggcaccattagcagtggttctcgatttaaatggtggagggtgtatatagagaccggtcggagctgtcgcatggtgacgaagcttatgacttgttatgtcctttgatatcccaaggcgtttcagttgtccagcggcggtttgcactttgcagtggtcgattttcttcttttcttttctttgcctgacgattgcctgacgactagaatccctgattctgctatgattgtgcttttgagtagaaagttttgcaattcgatgtttcttagcggcattcttcgtagctaaatattcattccattactttcagtccatatccgcatcaatactcaataccatataccttactcattaaatcatcctacaacggcggcggcgccagatccaacccctcaacctcgaatttaaacgcatcactccgtgaataactcccagcaacatcgagatcgagccgtccacgctcgcaatcatccaagtcaatgcatgcgatagctaaaccatcacccgccgccacagcaggactagactccgtagcggacgtgccaggcgcggaatccgtcaccgcagcatcgctactatccggcacgtcatccgtgcagacttcccacagcggaccggcaagaacgtctccaagcggcgaaacaatacaacttccaccccgacagacataatccaagaccgagtctgacggatccagggatgactgcttagtattcgtcgcgggaccctccgaccgactctgggcctgatcctgggcctcgccgtgagtctgcggccagacaatctcatgcggaccctcagcagcgacggacattttcatctctggatcgtgcgatttacccgaactagattctggaattccatcctggcttgcaccggtaatccactccggcagctcggagctacgcacgcactggttcgccgagagcacgaagcagcggccttctatgccgatggtgcgcatgagcgggagccaggtactgcgggcgtcggctgtgggagcgagatagatattcacgttctgggaatatagactctgacgcaggaggggcatgtagctctcccagcagattgcagaggctatggttagtgggataccgtttagggttgttgtgacagcgcggagagtcgagggcgagccctgagcccaaatcatgcgttcagcagccgtctaccaggtcagtatacataccgaatgatagcgccagagaagaagaaaaagaaagaaaagtccataccggcataaccttcctcctcttccccagaatacctctaacaggatcaacataaacaacagcacaatacaaactccctcccgctctctccaccaatccagtaacgacgaaaactcccgtctccctcgcaacacgctccagaaactccctcgtcccatccccgcggaacctcttaccctctgcaatctccagcctgcgagcaatccagtcagccccggccccagtcggtgtatcgcctagatcaacagcggccttgaaatacacgaggaattggtcccggccgcgcgggtgtcgacttcccaccgcagacccgaacgaacatgtccgcgggtatccgcctagataggcttcagggaagaggaggaggtggacgccgcggcgggcggcgagggtgcttgttcgctcgagggcgcgcagggtttcggatagggaggtttgggtgcaggattgggcgactgctactgtgagagagggcattttggattgatgttgggtttaggttactattggagaaaggagaaggggaaaaggggaattgagttgacaatgacggaatgggctcgaggaaaccttggatgcttgaagcttggctgggagtacccgtgtagtatatattgaggttgaatggggatatagagtgtgttatgtagactttgatatcagtaggtggacaggaagtccaaagaggcttcagactatcggatgaagtaactgtgaaatgtgattgtttgcttttaaaaagcctataaagtctgcactttcttcctcttcctctcttaatacttcctcattatactttcacctatacacttataccaacgagctttgaagaaatgtcgacctgccacataagaaagtgacggtggtttgatgaagcaatatccgagagagatattctttcatatatccaagtatctatgatatagcgaaaaagaagtaacgttacccccatctgacatttatcttctctactgacccaacttgattctccaaaggggtctatatggcgttgttccttggacgagctcggcaatgaggcacccgtctacctcttgtgaattctcccttcttcctacctatatacatgcctcgattctcagggatgaaccttatttacgggacgtgttacccacaagtcgttgaacgagtacaatcatgcaaaccgcgcgcatgcatgccacgaccaacgggcttcgatgaagaggaccaaggttattggaaagcccacagagctacgctactcccagcaccgaacaacgagcagctatttggttggggtttccatccataatcaacgagagaagtcgtttcgaacatgttgctccgaagctttctttctacagcaccttcaaaacctcgactgcgttgttctcagtcaaagccattttattctctcggtgctatttcggataacatcagtgtcaggatgtgctctggagtttggttttgtcagaatattgttcgcggcatgacatatctatccaaaggctgcgatggcaaatacgactgtaaccatagttggcttgtgggatggaagaattccttccgtcgtctataacattcagtttgatcttcctcaaggccctattgtggctcgacctctgaggcatgagatactatcgattgtaacggttttaattacaaatcaagacataagaaaaaaagttgtgtatgaacagtagggtataatcgaaacaaaaagaaagtagtcataaccgtatagaacgctgtacaaaaatagaacttttcttgttagccaccatgattaggggtattggtcggcgattaacaaatgaacctggacgaaaccatccacatctcgtattcctcagtggctggctcgcagcgtgctcagcctttccgagtactcaggaggggcaaggcccacgtcaaccacctcactgcgagtatggttggaaaaatcggtaggagaagtcacattgcgtgggtggaagaactcctctagttcttgctgtgtgacagtgacaccgagtgcagccttgatggattcagcgtgcttggcttggctcgtgaactgcaccgggaggcggagggagattgtcggtgtcatgaggttggctgcgggggtgtggtatgtcaaggagagctcgagggcgtagatgcgggacatcagacaggaatggaaagtcgggacaaaagcttttgactcgggcagggtgacagggaccacgactgatgcggtgtagtaagtgtccccggtgaatgctgaggacgggcccgttgatgaatcagatgacgatgagtcggtggagtcgcggcgcatcgagttggctgctgatgattgctttgtccactgggcggattcgacacacatggtcaacagaggcacgctttctgtgtagaggccgcatccgatatgggcgaagggcatgccggttgaggaagggaagtcatcccatggggccgcactgaagaatgtgctgacgcgaagtttgctggtcattgttccaagtgcgggaggcttctcgtccccgattggatcgaatcgcaggtttaccgtggccacagtgctcactgtatcacttggctcaccgtttggaggaagcaattgaacggctttgggctgggaggatgaagcaacgatgtgtcctaatttgcctcgcaatgttccgcgcttgacgctcttctctttgcgtgtgcagaaagatgggttcgccgaggtttcaactgggggttcttcttcgacaattggaatgatacggatcttcttggcaatggcggcgatagccacgaatccagggccggtgagttgtttctgaagaacagaggcccgaaccgtgtagccaatctgggacatgttgggtgccatatcatctagcagtgtcttgccattgctggcaaggatgggatcacccaatgttggcggcagcatagtgtgggatcgttgaatgtgagcattcttcttggtgtgggtgcagacctggggcaacaggtggtccgggacgacgaatgtgaaggggtattcatatgtccggccactctctagcactcgcggagtcggatattccatttcatcaataggctggcgcaacttaaggaacatctgttgtgaccccgtccggccggggcatgatgcccgttctaccgtagttcgagatacacctgttctcaaattaacattgctcacaggccgggcttcaataggacttaccttcaaacaggatctcaatctcatcaaatcgggtctcatgctcaacggtgacggttatggtgccatcaatactctctgcggtggtataagagttgacatgtcctggcttttgtcccgcaagatatatctcgattttaggctttgagcgtctagtccaggcatctaacctgtctgagccagagctgatgattgaagtggccgttgacattgttccacggaaaaagcaaagagaatatgaagcctcgtcccacggagaaatgcaggaacaatataaccgacacgtcaaagttaagacaagatggaatatcaaaaagaaaggaggtagaatagagatcagatcgaattgttcttaaggaaaaataaaggaaaaaattagtaaacggtggagccgttgacaaccgcaatggagtcagacaaaccaagtgtggaggagccgtgacaagcaatgtgagcaaggtttcagattgcctcatcgcatatccctcaaggttcttataaatcaggttggggtgtgactcacgagtcatctatagggcgcagctaccatgatatcaaatcacgaccataacctacttggaacgcccccaaatccaaaaaacgagcgatcgtatacacttcagtataaggaaggccgagccatggagtgatcggaggggagagagtgattggtcggatgcgaggatccgttctcgcccatgcacgcccttgggttgacattccgcttggccaaggagcatagaacaacgagaggtcaattcaaggtcgcacatgatattcaggtggatttccaactctaaagaccctatctctagaaaaacgcccttcttcttttcccgatcgttcagatccgatcttccaacctaaaacagccagtcaacgtccaagtacatcagaagtacggagtaacagagtacaaactcaagggggagaagtggagtgcgccttactaacgacatgcacgccctttgactccacccacattctcgaagggcgcccgagctcctctgctgtgctcgtgaaatggccaatcattgtgtgtcgtggaactctgtttatcagaatgccgatttccaagcaatatcccgtggattcgcatttgtaacactctccagtcatatgtgaggaccttcaggttttctagacatgaggtctagtataaactcttcccgcggaaaagagaatatggaacctgggcctagctccggccccagagatttccggccatagccgagcttttttgcgcgccgagcttgttttttcttgttctcacggagtgtcggagtgtcggagtaaacaaaaagatggagtctcggatggtgcaatgcgatctttcggtgtgcaaagtcatggggaggccgatgatcaggtgattcctatgcacgtgtttatatgggaaagtcgtgcttttcgagttctacagctttgcaaatatttcaagagctcaagataatcggagtattaagctacgtatatacaccaaaactggaataaaaaagatttagaataaattgtttcattcagtcactaggataagatgacatttacaagcatgtcccaactgataaattacgacgcagacccgtggtgcatttcggatcaaatcgtactcaaaaatcgtcgacgcgctttcacgcttcttctcgtctcgtacaagctagcacaaaaaagtgaccagctgcatccagctcaagattaaccgacgggaaacggcagaccgagcgaggcaagagacatcataaaagtctacatggctaaagatagccaggggaaaggaaggggaaaggaggtctatgtagtgcaacgtcgaaacaatcagtttcacttgaaaattagtcgtggttcaaatctgcataatcatcatgcattaagaaagaggtaggtatctgaagcccgtagataggacagcaaggaacgccagcagacgccgcaaccaacccgaaatcaatacgccacccgtgttcgcatatcctgggaggtgttagtaaaacgccaaatacacactggggaacttctgcaacttaccgaaatcttgcgctcaatctcccgaacagatcgatcaagctcacccgcaatcatcaacttggtatcattaggcagcagaagatacatttcgcaaagatctccgtcaataacgcccttcacaggggcatagtagctgcggtacatcaaatggtctcgtccagccagagggggttgctgggaagccagctgggtctccagaagctggaaaaagtcgacatcctcacggctgacaaaaggaacaaacattccaattgtgccttggagaccagtccagacaataatgtcacgacctccagcgactaactgagtcttgtggatactagtgggaatatcctgggcatagaagtggatcatcaactcgagacggtggggggttccatggagataacccttttcgtggatgaggtgcgccccagatccatcttcgtcagactcttcggaggccttgctagggcaacggaccagccacaggtttccgaacttgtcaccaccagcagtcgtctcgtaatccaccatggttgtactcgaggtccagcgtgcgatggaatcgtccgcgaaggggatcaagacattgtcctggtacttgtagacaacgtaggtgacactctcacggacgtcgctgacaatgattcggctgccttgtgtctgcagacccacaatggtcttgggtaccacgggtgcttgacatttccgtaggagttgcttcatgccaaggtcgtacacacgaagaatggggccgacgcctgccagaagacgcccttggaagccgagaagagcaagaggaggctcatcaacttgagtcttgtgaatgaactccaattcccgaccatcctcctggaatcgatagatatgaatgaaaccacaagaggacgagggagggctgactatcatatccttggcagttcccacaaccaagaaagtttcatcgtcttgactagagaaggatacagcggcaagactgactgctgcctcgttgtcctcaaggtcaagagtgaagatcacagatttggtggtaaccgggtccacaatttggatgcatgaagcccagtggccagtggctcggggatatccgaagtcaactggaggaaggtccgcaacctcgccattctgagcttgggaatcatcaatcagtctctgacgggtagcaggagagaggacattgttgtcggcttcaatgacgtagaagaggggttggtcggggtgcttcacaaagcgtcggggagtgtaagagagagggatggagtcttggagcatattgttgtccaatttctccacagtgaagatcctattttcggttagtaccagtccagaagaatctgcagtctcaacatggtataagagaaggttgatctcagaaggaacaattggaatttttcttttaaagtttcatccacatagaagttcggattgattttctcatcatagaatcaaggggatgggggaattggggggattttggatgaacataccgtagactgcggccctgaattccgatcatgccctccacacactgctcactggagaaattccatccccactctagcccaacatagtccaagggtgtgagcataaaactcttggtttggacatcggagtatcccagccagggacgggtgctgagcgccagcacagctgtttggcccttgaccgatacctgggatagtttcacaggtttggcaccgatgaagcgagttctggtatccgagagctcaccggttacctcgtccaaaacagtacgaaggtagacacctgagtaaagaccaatgtggagataaagagtcgtgcctcccgagctcgaatcagccatggccataatttgcaaggcagatggtgcagatgtcaaagcttgaactgatttgctctcgagtgttgagtctggatcgaggctgagaatgcggacggtggagtcatcacatccaacggccaggaaggagctgcgcatgcgaccctctggtacctctcccatactcagggaggtcacggtaccagacatctgtcgtcgctcatcatactctgccaatgtcccgtccgcgtccatctcaaagtagacaatttcacctgagctgagtgccactgcaacttgacgttcattggttgctgctgcaacgatggaccgatgctgcggaacgggccattcattgactcgctgatctgcgaggatgtgacgaatgcctcgagggtgaacttggactaaagaatcctcgccgatttgttgcactgccagagtaggggccgaagaaaggaatccagtgtctgaaacttcttcgacaatttcgccgatgctcaggacgagggtgccgttggcaaaagaaagaatgatgtatgtgtgaaactcatcggctcgggttaacttggttgtccatacagccgaaggaacttgctgaaggtccgactccacgatctcagaaaccttaagtgcgtgcttcaaggtccggaatgtgctgcgggccccagagccacagattgtgtagatttgaggggcatcatcctcactcaaattgaggattttactgtcaatcagagggctcaacgagttcatgctttccatgaggttgacattttcagcgcctcggggacggaagtagattggcgcggaagacacagagtgatcagccgagaatgagtcgctggaaaagactgcctcgttgggatcatcaccaagcttctcgaattggtagaaattgtgatttccagattcactggcggcatagaggaaaccgcttttcagaatcagcagattggttgatacaggaatcgtatcaaagtatttgatcgtcagtctcttcacttctccagtaggtttgccctgcttgtcttcgaccatttccaggttcaacttgaacagatcaccatcctcggtttggagaaggaagaagaaagcacctctcatcttgtgcatgactccagagacaatcgagcgcttgcgctcggggttttcggtgggtccacgacgtcgagggatagggacgcggaacgcaccctgattggagtggcggtaggtaatgttatcctccgcgcacaccaagacaccgcttgggccatcatcgcctccaggtacctggaacagcatggatgctgtgcgatcaacagggtcagaccacttgcgaacaacgtgattcagaccgaggtcaagttcgtagtacaccaaaaccttctcgagttcttcgtacgcttcaccagtaggatcctggtcagattccgagtagtccacctcaagagcagcgaaaacggggttgtcataaccgacgtccaagcagatcatggcaaaaaccaaggtctggggcttgttggcttcgagcggtgaggagatggtaagctctgcctgcgagtttcggttgagaacatagaccagcttattcttttccacggaagcaatcaggcacgcacgtccctttggatccaccgcgaggtattggcccggcacgacgcgacgaaccccggattttccgaaggtctccatatgaatgcgattgaagcggttctgggagggaacatattcaatgattgtgatgcgacccgagtccgagccgacgatgatgtaatctatgagaatcagcaaagtccgttgataactaatcgttacgagtatcaacgtcgctgtccagggcaggtctcaaccctctttcaaggggagacttcgtaggagtaccgtgctgcccaggaagcttggagaatcactaagttgtactcgtagaggggcagatgaggagcttaaaaagtaaagcgacatacctttgttgcttccggctacgcggaaagctgcgagggagcgaatgatgccaaaaacatcttgagagaaaagaggcgtgatcttgccctgtgccgggtcaggccggtggatggttaatttcgagcctgacgaggtgacgatctgctggtccctagtgcctgcgaattgacctaagatggcctgtgtgatggcagttgggggctggatcgtcagggagtacataaacatgtgcgatgtggtagccatggtgcgcgcgttgaacggtttccccgtaccacacaaaagacgtgaaagctttgtacatgcaattgcaagtcagggggtatgaatattacatcagtcccatccctgctgggtggagataagaaaaagaaacacctcaagatcacttggcacggatagagagaggtgtagccgtgtgatcagactcgaagaggtgaggaagagaaaatattcctggccctgtgggagcttcgactagcgcgatttgcacgtgatccatgtttcgaccgccttccacgctgcgccgattgatgcaaggcagatcgcctccgcataacgggctcactgactcccctctttcttgtttcatctcactttcactgttctcatccatatcaccacagttcatctaatcgggcgtttgatcagcccggcaatagtcttggtgatatacccctcatcattgatctagcttctaataatcacccacttgctctacaatcatcatacatccttcagccatggccgacgagacagctaccacagagcagccccccatcaccttcactgtcaagtcatccaccgatgccaaatacactctcaccctcccgctcactactctggtgtcagatctcaagcagaagctctcaaccccagaaaatgccgatacccccgcagaacgccagcgattgatctactcgggtagggttttgaaggacactgagacactggagacctacaagatcaaggatggccatactattcacctcgtaaagagtgctgcgagcaaccagcagcgccaaaacacagctgctcagcccaactcagcttctgcggccggtggagcaactccagcgatagctggtgtcccaaccaatctagccgctggtactggtaacaacccacttgctggattgactggtgcgagatatgctggattcgcacaacttcccggcgcgggccttttcggccctgatggcggggtaagtgagctattatggcggatggaagctattcagcaatgcctccaacagatagctaacattctttggctacttagatgggtcctcccccagatactgagtcgatgctcaacatgctcgagaatcctcaattccaatcgaccatcaacgaagctctgcaaaaccccgctatgatcgacatgatgatccagcagaatcccatgcttcgcgacatgggacccggagtccggcagatgatggaaagcccagagttccgccgcatgttgaccgatccgagctcgattcgacagatgatgcaaatgcaacgagctatgggaatgggtggcggtggacttggtggcggtgataatgcattccctgccccgggggtaacaaacacgaccgctgagggagccccaggttcagagcaacagaacgcgcaaataaatccatttgggcaggcggctcagaatcctcttggaaacgccaaccctttcggtgccctctttggagctaatccgttcgcaaccccagcccagccttctgccaccccaggcaccacttcacccggcggtgcacaaggtgccgattctacggaccgatcaacatctgctgaggggcagactcctcaggctgctccgaaccccttcgcagctcttctgaacccggctatgttcgccaacgctggacaagctggccagggcggcgcgaacccgttcaatcctcagcaaaatccgttcctacgtgacccggcgctacttgcccaaatgatgcagggaatgggtggacaggacgcacaaggtggggctgccggtgcaaaccctctggctgctctacttggcagtggtggtttcggaggtggtctcggagcaccacagccgcctgcagacacccgcgccccggaggatagatatgccgatcagttgcggcagttgaatgatatgggattctttgagttcgagcggaacattgaagccctgcgtcgcacaggtggcagcgttcagggagcggtggagtacctcctcagccacccatgaatcatgatactttctgggctgctttcttttctttctagcacagccttgcggttacttttttgatgtattcaacttctattgattttgcgaggtgatgaaatgctccctcggtacctatgactttctcattccccttttagcatgcttatcttgtgtgagatccttagctagttttctggatatcacattgttccagggctcagaatagcatgggatcattttctaattgaggtttctgtgatactcccaatttcgtacaagtcttagtctacaaaccttgaatccaaccttggcctatcccagagttagtgtggatgcaggaattatatgaagcggttccggaaagggccctaatgtttccccctgaagaaagggctcgaaatgtctgtgtcctagattgtattatagttcgcatgctcttggtgcctgctagttgagtttccgggcttggtattagggtatgatatatatcagtcagatctagaatgattccaatttttgcaaccgtcccttggcgagctgggatagacgtatcttacaagtcttacaagtgtatattcggatacatgtgaatttgaccatccttttagtgccttcatccatatatgcacccccttcgcccctgggtctgcggtatgttgattaggtaacccggggacacgctggagtaggccagggaagcacgaagctccctattaagcccccacagttgctcgaactcctttctcgacgaacttatatcactcctgtggcactgagtgccgatttcagtcgttacttagctgttcctcggcagattgcgggcgagctgaagcaatccgatggtccttgacaatctactattcaacacccgcttcctacataaagtccaccgtcgaactgtccatcggccatctcgacaaagcatcccttgaacgagatattgcctacaccatagtcatccctgactcacgcgcttcgatctaacctttgcgggtcgacacgccgttacccaccgacgtacaaccctctccatactttgtgtacatgctgggtcgataactacccgttcactccgggtcgaggacaaaacatatctctttgcattattgaatatggcctttggtcaattctgttcccgtcagtgggcactgtgggtgctgctgcttgtgtcctgtaccggcgcattctacatccctggtaagcaccgtggcgcatattggttggactaagcatatgatactcatacttttcctcccaccaggatactcaattacccggtataatgatggcgatccgattcctcttctggtgaacaagattttctccgatcacacccagctgcagtatgcgtatttcgacctgcctttcgtctgtccgccgagcggcaaaacacatggcggctcgccgtttggatccggccaaagcatctcgctcaatattggggaggtactgcgtggcgatcgaatcatgacctccgacttcgaagttgcgatgggaaaggatgttgagtgccggtcgctctgcacccgtgatgttagtcggtcaaatgtgaaatgggcccgtcaactcatcaaggagggatatgtgatcgaatggattgccgataatcttccaggagccacgagctttgtgactgtggatcgaagccgcaagtattacgcttccggattcaagcttggctatcgagatatctctccagtcaccggacagcatcggtactttatcaacaaccacttcacgatcgtcatccgctggcggagcgcaccggaaggagggaaggtgatcgtaggctttgaggtgtacccgaagagtattactgccgaggaccgcctggaaaatggatgccccaaagctgtccacaatagcaacgaaggactggggctgtatatcgcgccgaatctttcgcgaatggaagagaaatattccggactgtcatatatcccagatgatgatgacgaagatgatgacggagccacactgaaggttccctacacctactctgtctacttccgagaggacaccaacgtcgagtgggccaaccgctgggatttatactttaccaatcaggttgaaagttcgataacccattggctggcgatcatcaactcattgacaatttgcaccgtactgggagtgaccgtgttcgtcatctggagccgtacagtgcaaggcgatctcaagggtcgcggcgatggtgcgatggacgatcggaagatgaagggccaatctcgacgccggagtggcaagtctgagaagaaaggcgaggggcttctggatgatagcgcagatgtcgagcgcgatgcagactactcctcagacgatgaggctgtcgaagatacaagtggttggaagcttcttcatggggatgtgttccgtatccccgcctatagtggtcttcttgctcccttggttggatcaggaatgcagttgttattcatggcttcaggcttgctcctgcttagctgcctcggaatcttgaacccaagcttccgtggtggcttcgtcagcgttggcatgggtctgttcgtctttgcgggccttttctcaggttacttctctggaagactttacaagacctttggcggaaccgcttggcgcaagaacacgctcatcgtgcgtatcctactccaattattcatgtgctatgctaatctatagttctagaccgctttgcttttccctggtctggcattctgcctcgtgttgattctgaacttgtttgtctgggcgcaagcatctagtacggcaattcctttcggcactcttattggtctccttgcactttggctgctcatccaagttccgctggtatacatcggcagctgggtcggctatgtgcgtgcgatgccatgggagcaccctctgaagactaatgcgattgcccgccaagtcccaccccagccctggtatctccgcacccctctcgggcctgtggtaactggcgtcgttccatttgcagttctttttattgagctgctattccttttcaagaacctatggcaggacaagtctggttattactatgtcttcggcttcctgagtgctgtctcaaccgtgctgattgtcacggtcgttgaggtgaccgtaatcgcaacatacagccagctttgctccgaggtaagactgttcttggcttggtttctggatcatactgactcccttagaattatcattggtggtggcagagtttcctcaccggcggaagcagcgctttttggatttttgcctactgcatctggtattacatgttcaagctccacatcaccgggttcgtgtcaagcttgctgttcttcagctacagcttcctcgcttgtgctgtgtatggcctgttaactggaaccgttggtttcttggccgcttatgcgttcgtccggcgtgtttataggtaaggtcattccattgaatctgctaggcaagaggctaatcgtgagaattgcagtgctatcaaggtcgactaaaagttgacacagctaccatcctcttcttgaacttcttcaacccagagacttgtctctttaacatctacctctttacgatctgtccgataagcataggtgaagtcatctaccaccatggcgtctagtattctattttctgcattttctggctccgaacttttgagcctttagttcccccgttgttgaacacacaaggcacttctctttccttattttgtgtccgtgccaaagtatacatcagttataatgtattgatatgtcgctcaaatccgaggacaacgttacctagtatgtcgacatccactgtaaatcgaatactgttttgggaagtacgatgccaagcccctaggaaaccaagcgttgctctttcccggaaacccctgactacgatccttcccggatttagctcaaactgtactggcatatgggatcgagctcgtggctataaaacagaacaggtatcccctcacaaggaacgttggaagcaatgtagaagtatggctttcgtctcgggtttcttttcgcctttctccctcaaacacaaattgaacctgatgttgtatttttagttgcaatatggggcagggaacaaacgcaaagccacgggaaggtgggtgccgcggccatccgggtaagccggttggcaaggggtccttgcctttctctttgatagtgtttatcagatgtgatcaaggcatacacaccgcattacactacctgaaatagtatgcacatcataagtctatatcgggtcaaagcatccgtgactccgtgacttgcaaatttgtactccgtacatcaatgtagacgtggccatgtggagcaaatcggacatatagcaagaatcgtgcatataacagctgctaagaaatagcggtgactatgcttcgcctccaaggtacggagtacatatgtacataaatccggggcgatcttagaccactcgccatggcgtgctcggaaagggggattgctcattgtggagctgtgatgtacattgcgttgctctccttttctttccttttgcttcagcaaagtttgaagagatgatagaagaaaaagagaagaacgagaaaaggagtcccgtcggcggtctattccgtcgatatctcgcaccctcaccgcgctcttcttcaatagtgtcaaatcaggcggtttgattgggcgtcaagataagcaagtggatactgaactctaagctcccactctaaccatgttgggatatcctaagagaataaaagactgcaaccattggctgagaagggaatgacacgatcttatggatcccaaggtttgcctagggtcggcttcgggattcactaggctgaaaacagttagcctttacaagatcctgtcacgctggaaacgctgccatggacgtgggctgcccatgccgttatccactccggggtcgagtgcgcgtgggaactgcactgaagctagactgcgtactaaaacgccggcctttgacttgatatgctttgatcggcattattggtttggaggggatgagatcggtggtggttttacatgctcggttggtattgtggtggtattgtgactttccaatgtgaccgacaccaacgcggcccccatagttgtaaagtggcaactcactcggcacttggcccgatgggatttgattacctacaattgataaaaagcactggtcgtgtgactgagattgttagtttgatctgtttattaaaagataacgagaatatccacttgggagagaaagtatgtggtttatatgtcctccgtaggtaaaggtagattatctacttcggtattacgttaccatacaggctcttccgaaatcacaccatcggtgcctcaaatgatcccatcgtccttgcgggggagtacgtcagtaccggatcacatcccctgatctccgttgcaggcgggaactactttgaactaatcgatttgggatgcaattgcaatgtccaggccttttatggagtacaggatggtcgaatctaaagagaatatgatcttcattgggtatcgcaatacattacatgaaaatacatacccttttccgtcttggcctgcatctgtttgctgttttggtccgtcgctctcgaattatctcgtttttgcctctttgggtcttttcttttaaaaatcttttttttcctttgttccccacattctccctcgacttcatatatcactcgctctcccacactttcttccttcttcattcctttctccctcaaattaattccacctcccgccttccgttggccgtctattgaactggatattcaccatggcgaccaagaagcccaacatcctctacatcatggccgaccagatggccgcgcccttgttgtccctgcatgacaagaactcgcccattaagactcctaatctagatcgcctcgccgagggcggtgtagtcttcaactccgcatactgtaactcaccactgtgtgcgccttcgcgatttgtcatggtcagcggccagctgccctccaacattggcgcctacgataatgcggccgaactgcctgcggacaccccgacatatgcgcactatctgcgacgagagggataccacacagccttggccggaaagatgcacttctgtggcccggaccagctccacggatatgaacagcgtttgaccagtgatatttaccctggtgattacggctggtccgtcaattgggatgagcctgtaggtcaacttgcgaacacccggctgtggcaccactgattggaatttaggacatccgtgccgactggtaccacaacatgtcctccgtgatggaggcaggtcccgttgtacgcaccaatcaattggattttgacgaggaagtgatttacaagtcgacccaatacctatacgaccatgttcggcagcgcaccgagcagcctttctgcttgacagtctccatgacccacccgcacgacccgtacgccatgactaaggagttctgggacctgtacaatgatgtggagatcccattgccgaagaatggagctattccccacgaccagcaggatgcgcactcgcagcgcgtgctcaagtgcatcgacttgttcaacaaggagatgcccgacgagcgcatccgtgccgcccgccgcgcctactatgccgcctgcacatacgttgataccaacatcggcaagctgctgcgtgttctcgaaagcaccggtctggacgacgacaccatcattgtcttcactggcgatcacggtgacatgctcggcgagcgcggtctgtggtacaagatgacctggttcgagaattcggcccgcgttcctttcctcgtccactcgcccaagcggttcactccgaagcgcgtgtcggagaacgtttccaccatggatatcctccctacattcgtcgaattagcaggttgcaaactcgtctccgaacttcctctcgacggtgtgtccctcgtgccgtatttgaccggcggcgagggtctccgcactgatactgtctacggcgagtacatgggcgagggcacccaggctcccctcatgatgatccgtcgcggccgctggaagttcatctactcgaccatcgacccacctatgctctacgatctcgtcaacgacccagaggagaggaccaacctcgcagctggcctccccatcccatccagctccacccgcgcagccataatagccaaccagaccaacttatcatctatcaacttaccaacccctgacgacaccccgcacgcatcgccagttcctcagcgtgtcaactcggcagactaccccttcccctcgaacaccccccctcgcactccaagccccgccaagctcccgcctgcagtgcctaaaaccaccgacccgattaaaatcctggcgttcttcctcgaggaaacccacacccgctgggatttggagaagatccatcaggatgtactgcgctcccagcgccgtcgccgtctggtctactccgctctgatccagggtacccagaacgtctgggactacgagccacgcgtcgacccaagtactcagtacgtgcgcaaccagggcaagggtgccctcgacgatgtcgagctcatctcacgctggccccgtattctccagcaagccgctactgccaatgggatgtctgcataatcaccccgatcaggttttctgaatatacccattgactcgacattgaaaatattccattcttgcattctttatctttattcatttctcttgcatttcagcaccatttctattacctttttgcggcattcccggcattctttcatatcgggatccaattcttcttttttcagtgttgatatttctggattctttacatctctcattctcatagtaaggcgcgcgctatacccgggacttattccccaatctgcatcttttcatgtcggttgtggctacgtggattattttgtacatagttgtgctcatggttccccgggttgggtgtcttaccctgtatattgcggctggtttggggtattacatagacaaaatgcaatcagactgtcatttgggcttctgtactggtggtccacgttcttaagccacaatcaccatatatgtaaattgtattccacccagacgtcctctggtaacatcagctgaacgccgatcgctagatctagataccaggagatggccaacatggaggatcaagcggctcggcgcgttgagatattcttttcatacatgagcccaaagtatcatagtaagaactggtcgctctaggacacacctgcttttatagatctcatatcccacaagtctgtagattttagaaaataccccgccatattccgcgttgcactgcttccaaagtacaaagtaaggaccgagaggactaactcccgagaaatagccggttcattttatgtttggatcttgatcctttaacattcgaactaactcatatcaaaaccagtctctcaatgaagtttctctgctatatttcgaataaattgaacatgcccgtcaagatgttagtctttctttatcgcaacctccgcctgacaccggaagaattcatgaagtactacgaagcgcacgtcaaactcgtcaagaagctggcaggcacggatttccccctttcacatcatcgaaattatatcgcccgcaatacagtcgatattcccccggatggctttaccgcgcgcaatgccttcatcccggcgacgatactccgcgggcgacagccagagttcgactttgacgcctacgccgaacttactttcgcagatcaggtttcctaccaggcctttgcggccaagatctatgccccggatgccgctgcccagataactgctgacgaggatgaattttggatcggttgaaggtgggagtcgccttggtaggggaggtgagagttactgtaaaatgaggtactttcttgtcggagctggtgatcggacttgtttgcgatgcatgttggaagtccgatgtgatcatgaggtataccttcggtgtagtatctttcaacatgagggatattctcaagaacctagtatatgcccaatgaaacgtctttcaagtataactccactaacattcctctatctatactcggtcacgtttgactcccaaaattgcaaaaggaccagatgcataaagccaagacatgtgaagaactcccctcttcgatcatgagatgatctcagtggcttgactcctcagcttatcttatggccccttgaaatggcacatgcttcggtcgcatggtctcggtgctacattggcattccatttatccttctcacaggggccgttcctgcccggcaaaccgggtacattgatatgtgtcagactgcatatccttagaccctaatcagaaccttaaaccagtataaaccctcacttggcttgataataccgctcagttacattcattaacacgagttaggacgaggggggtggatgctacaacgtctgaagatagagcttctaccgatttaatttgttccgggctcctgactgtgcatgagtaaagcatttcatatgacaatgtcacccatccccaaaagtctccacgactgattggtggagggattcttagtcccccacgaggacagataagtcgagttgtgacaaagggatcaagcccaatttcagaatgttacacacttgtgtggtgtgccatgctgttggcgtctactatccatgacacggttagtacagggtatatcataatcgggtcttcatagtgtggggaggatgtactgtggcgctgcttaattgggcgccaacctcatattgatcattggattcgccggtggcttgtcttcctgaatgtgacaatgtgcagaatcctattgatccccccgatatcaatagctgaaacgatgtggccctcttggtcaggcaggtcacccttccggtaacagggtactattgactgtttgagctgtggacaaacgggctgagtagacacaattactattgtccggttgctcaatactccgcgggggaagtcatttgtttgtcgacttctactataaatagtgaggtcatttccctgatgctcgaactcaacaaccttcatcacacaacctcgcttggccgagacaccagaaattttgtccacacactccttcatcatgcaatttgtcattcctttccttctaggcctgagctggctcgccaacgctgcctacatccctgccctgaggaccaaaagcactgagattgtatctcgtgatgctggagagtaccactcggtggcatactttgtgaactgggtaagtttagaccatatacagtgtgtcactggatgaaattggggatataaaaacgtcatcatccaatcattcaattatctaaacaggaagccacgctaattaaactgttcaggccatctacggtcgtaacttccaaccccaggatctccccgctgagcgactgactcatgtgctttatgcatttgccaaccttcaccctgacacaggcgaggtctacctgtccgacccctgggcagacattgacaagcactatgccaatgattcctggaatgattccggagacaatgtctatggctgtgtcaagcagctgttcttactcaagaagagcaacaagaagctcaaggtccttctgtcgattggaggatggacctattctcccagctttgcaactgcctttgacaccgaggatggacggcagaagtttgctgattctgccacggatctgctgaagaacttgggattcgacggtattgatgttgattatgaggtcagtctacagttgccatttggagatgttgatgcttatcaatactacagtaccctgctaccgatgatcaggcggacaaatttgtcgatgcactccgacgacttcgtgaggtatgtgatttcttgatggatatccatgggtcctggctaatcaaattcaggctttggattcctacggctctagtgacgccggaaactatcatttcctgcttactgccgcatctcctgctggtaagttttatttccgtccttggacaattccaaaataactgacacaagtaggcccactccactaccgtcaggaacgtctgaaagagatggaccagtaccttgatttctggaacctcatggcctacgattactccggtagctgggacacagttgccggtcataacgccaacctccacgcctcgaccgacgacccggccagcacgccatttaacacggaccaagccctcgactattacatcggggaaggcgtagctgcaaacaagattgtgctgggaatgccactgtatggtcgagcgtttaccaataccgacggcccgggaaagccatacaatggcgttggatcaggcacatgggagaatggcatttgggactacaagggcctgcctttgcccgactgtaacgtgacagacttgggtcaaataggtgcaagctactgctacaaccaggacagccgactgttcatcagctacgacacgcccgagattgcgcgcatcaaggcgcagtacatccagtcccgcggactgggcggtggaatgtggtgggagagcagctctgataagactggcgaggacagtttgattacaactgtatgtgacgttcttttgatatatgattcaaccgtttactaacatatacacaggttgtggatacacttggaggtgtcgacgctttggagcagagcagcaatcagctgcagtaccctgactccaagtacgttaacttgaagaacggtttcgattagattatgttcatttggctgtcaatattgcaatattggagatttctcgctgacatatgcattgggacatttaactatggctgttatgtgatggacgatgggaagtgcgcctctcgcttgcatctatctcgcacatttatgaagtggaaatactattaagattgaactttgcttgaattgtatggatcggatgtagtagatctagattgtgttgtgttttgctccccaacatcactctccacaaccattgtacaatacatagtgactaactacaaagtatatgtattctatttctcgggcgagagcaatttatactcaaaaataggaattcatatgcatacgagtataattccctttcagccaatgagagtggcctatagacaatattccgccatcacggcccactgtgatgctataacatcataccagagtgaccgcggggccgcggggttctttttcgattaaaatataacttcgtttctcttgtagaaggaaatagtactttgtattgtttcctagcttctagcccgaaatcaaaatgtcgactcaagtatcagacgagaagcctcgcaaatcgctcatcctcaatgcctttgtggaaatgtgtacgaagcccattcataccacttatggagctcatctctgataatcattacaggcagcgggcatcagtcgccaggactatggcgccaccccgaggacgagtcgtatcgcttcaatgatgtcgaccactggatcgagctggcccaattactcgagtcggccaagttccatggcattttcttcgcagatgttctaggtaaataggtcaactgtggcatgttaggcgagaagtctaacaaatatctctttctaggaggatacgatgtctataaaggacccagaaacctcgaacctgctatcatctccggtgctcagtggccagtgaacgagcccttgtctgttgtcccagcgatggcggcggccacgaagaatattggatttggagtgacggtcaccacaagctacgagcagccatatcatcttgcgagacgactgtctacggtcgatcaccttaccaaaggacggtatgtgaagctagtgccagttttgagatcgagttgctaattaaacctttacagcctgggatggaacgtgagtaacacgctgaactcgaagaacgggttcctcaaaggaatatgtactaacaatcccctcaggttgtaacaggatacctcgactctgccgcccgcaatatgggccaagccgagcagctgcatgtaaagcctcacattccatattcacatatacttacaacccactaacaagaaaccagcacgacgaccgctacctcctcgccgaagaatacatcaaagtaacctacaagctatgggagtcctcctggcgccaagacgctgtcatccgcgaccgcgagcgcggcatctacaccgacccaaccggcgtgcgtcaaatcaaccacgtcggcaaatacttcaacgtgcccgggcctcatctttgccagcctagcccacagcgtacaccggtgatcctgcaagccggcacgtcgaaagcaggcaagactttcgccgcgcagcatgcagaggctatcttcgtggcgggccacagcccctccgtagtagcgaagaacgtcagggagattcgcgagcttgcacagagcgagtacggacgtgatccgcagagtatcaagtttctcgcactcctctgccctgtcctcggcaagaccgaggaggaggccgtggagaagttcaagtattaccgcagtctggggtccattgatggagcgcttgcgctgtttggtggctggaccggcattgatctggataagtatggagatgatgaggagctgcgacatgttgagagtaatgctatccggtatgtgataattctccttttcggcttggcagagactgactcgcgatttctgtagctctgctgtggaaggctggtctaaggccacacctgaagtggctaaatggaccaagactactgtcggccaacacatcaccgtcggagggctgggtgccactcctgtcggcacagctgctcaagttgctgattacatggagcgatgggtaaaagaagccgatgtggatgggtttaacctggtaagttgtgttattgaaacagtctgttgtcgagacaattaataacactattcgcaggcatacgcaatcaagcccggctccttcaaggatatcattgatctccttattcccgagcttcgcaagcgaggcctgttctgggacgactatgccgtgcctaagggaacctaccgtgagaacctatacggacaacccggccagtccggaccccatgcagaccaccctgcttcgaggtaccgatggaatgctggcgtggatgcttctgatgctgtcatcccggagaactgaatgctatacctgacatcatttaagaaattgaattgcaatgaccaacaaataattagaacaatcaatttttagacagactatccgtagattacctgcaaggcccgcacaggacctgttctatggacgccaagaaaatgcagattttgtacacaatcataaccaaagctctaagtcaacatgtcatcgagacgctcaccaaggaccttctcgatctgcttaacccatctacggacctctctctcaacactctcatcctcgtcttccataagctcactgatgtaaggcagcatctctggcagaagtgccagccactcctcacccagttgctccgtaagagcctgttcggtcttgagggctgcgagacgggtgtgggggctgtcgccaccagcgaagcgggcgttgggcgcagaggaggggcgcaggtatttcatcagcgcggagttcagctccttgtggttatctgtggagtcggcggcgatggccagttcagtgattgtgggcacgacgtcggcaatgaccatgttcgaggtggtggtgctgtttgcgtggccgagctgggcgatcaaaggaccggaaatgctggcgagatgggaggggctttgccagaattctgcatagatgttagtggccgtaatgagctatattgggcgcagagggaacctaccatcctggtcatgctcgaaggacttgcggagcatacgaagggcagccaaccagagggacttttgggccttggagggacccgtcgtgtttagaacactgacaacgttctccaacacatagctggagtacccggtgacaattgactgaagaagatattagcgagattaatgtatggaaaaattgcgaggtaacatacctggagagtaccaaagaagacctcgaggaacttgtagaaagtcgtgaggcgcgaggtttgatcctgttcgttcttgggagcgccggtagtggcccattcaacaaacttgaggaagatgggccggaacgtgctgtcattcagcttgtagatcatcttgattgtaacgtcattgagtgccacttcggcctcatcaatagcagtcgattcgaagacagccttgtcgccaagagcaatctgttcccggcgaagatcgaacgccttgaagagaatcttcgtaaggacgccgatgttcttcgcaatggccgacttggggtgcttgtcaacagcaatcgtgacaacttccaagagttcgttcacagcaatcgggccagccttgacggcgtgctgccaattccgatcgacggcgccgagagttgcgcccagatccaccttgcgggccatcaaccgcagggactcctggcggctttcatcactgctctcctcgatgtccgcattagcagacttgaaggacaggagaagcatcttgtccagatcgccagccgagatcatgaatggcaggtgagcgaaaagggcagagaagagggtgaagacggcgtcgtggagtcgcgagttctccttgccagggaccagactcaactcgagcaattctaatgaacgcttgagtgtgtccgggagggcaggaatcatggcttgacccagcacctcagccatagaggccaagcacaggatacccatgtagcgaatgcggtcatcggattggccgaggcaagattcactggcaaccactctagcggcagcaatgaccttggacgggtccttacggccgtacttgtcggtgatgcggtcaatgcacgaaacagcagcatgcttgagcagcgtatccggagacgactcgacaatgctaaccagggtgggcaagaagtcgagaacccggatctgcgacaggttgtcacgctcggggttctggcggaggcgagtctcgagcaaacggagaaccttgcgtcgaagttcgtcattgggaccctggagtagaacctcaatggtatccaggaagtcgacgagagacagagtgctaaacagagagccgaggacctcaccacaagcctggctgacgggcttcatactctgcacagcctcgccgatgctcagcacctgggtcagaactcgggagaagcaagcgcgggactgatcagcaaactcgtcgtccgactcaaaggccgtctcaagcttggacttgagagaagagtgcttgaacaagtgagcaagatcacgcaggagatcaacgcagatgctctgggcgtcgcgtccatcgtcactgccaattccaagaagaacctgagagatacctggtttggtcttgagagcatcgctgaccaagttcaagtacttgctgtaggtggtaagctctacgacagttgtagtgtcagagaccagaccagtcatcagagtgagcacatccttgtcggtggagtatcgattagcgagcattgccagaacggcgaacaggaagtcttgtgttcccagcttgctgatcaaggcatggaagagtctcaagcggcgatgggcggggatgtgctcgaaggctgcagtgaaactgagcagtagctcggatgttccggagacaacatccctcttctggttacgcagagactggataagagcaggaacaacttggtcaatggtttggtcaatgaccgaaacagagtagtcatcatccttgcgtagaacggtagtgcccatgaacgtgaagatcggcatgacgctgtggagaaccaactcgggcgcaatgacagacagactacctacgagaagaagagcgccgttctgaacctgcgggctgtcggttgttcggacacaatccaccaccaggtcggccctgatgacggatgtatcgaacttcggcttaacagatcccttagatgtgttcacaatagccaagagacttcccaaagtcaggctgaggagatagctcatgccagactggatctgggacttgaagtgatgaagagccgctagagtctggaacaatccacctgcaagctcaggatgagtttctggggaggagctatccacgatctccaagatgaaagtcatcttgtccatcaaattgctaagctctgcttcgtccttgacagtcatcgcaatcatgttgttctggctagtacgtctccgcttcggtgctggaccaacagactcaacatcggtgatagacacaggaatcttttggacaaattgctgaagaacagcaccggaaagctcgacagtgcgaagaacgtcgcggcagttattcgccagagaagcggcattgaccgatcgcgaaagagagatatcgagcaacttctcggatgcagtcaactgacgttcttcgggaatcttagcccagatgtgtttgatttgaccaaagcaagccgcaacaaaggacgggcgcaaatcaccaccagagctgacattggagaggagaacatcgatggcgtccttgtctttggatgtgacaatagcagcaatcaaattctctgtctcagatgccacgatgcgctccttgccacaaatttcctcgacttccttgtcgctcaagcgacgccaatcctcgagcaccgggagaagctcactggtcagggttgcagtagagaccttctccacgctgtttaccaacttcagcaagctaatcttgggtgcgaacactggcatcttgacaacatgagagcagatgaacgcaaagagactaaggcggagagacttcttgagttcggatgcacccgaagcttcggacagaacgttgccccgaagagtagcttccaccatcctaccgacatggttagagtcaaggatagactcctccaaccctggaagcaatgcccgctccaaaatcttttgcgaatccttggtggtcagccatgcaacacccgtggattgcttgcccttgccgtagattgagtcgtgagcccatggcttcgagctgtcaccggaagtggtgttctttttgtacaaagatccgataatagccaagatgccagcagtctgacggcgaatccgttctgaaggatcagagagggctacaaacaggaatggcagtagtgcctgagggtcaaagtccgcgggtgccgacgaaagaacagatgatacaacgttcaaagcagcgatctttgttccgatggggtagtggccagcaacgactctgacaaagaaggatagatattgaggtgttttgatcgcctgggacttgcccaagattggcaaattggtgaaaagctcgagattgtcctcggagtccaccgccaaggcgaaaacgcgaaccaggttatcgaattcgatgatagactgtttggagaggaaggagtatgggaacaaggactctttgatcaaagactccaaggctggggtaaacgcatccacctggggctgatcatccgcatcgatcatatccacatcttcgatggcctgtgccacaactggggcctcgacaacggtctgaaggttgtgctctagcgccgagatgttgagcgaagattcagtcaaaaccttctggaaaataggttgcagagtttcagaccggttgaatccttgaaccagttcagcaagctgtgtctgggcatccaaagacattccgcgggtatcatctgcattggaagctgcttcgagaaccaggctcatagccttggcaatctcattctcaccaagcatcttgcgttcaaagacggaggccagaattgcaaggcgagcattgtcctgcttgtcaagatcagtcaagcaaccggcaatgactccaagcaataaatttgatgtctgatattgtggcgcgatttcagaaagttgggcgataggattctcgaggcgcaagatgcccttaaagacccttttggggattgtaacagtaggcttctgctgtgcaaggactgaaagacaaatcagaccagatatctttgtatcttctgtccaagaacccacaacactctccattaggccatcggtaacttcgttcgagaggaaggccttctgtgccagtacaacgcagatcatataggagccaacgatcaattccgaaacattcttcattgtgaaagcgttactgagtaccggcaaaatccgcaaaaggatatcttcatgcttttgcttctcggcctctcttctccccgagcgagcgccatccaacattgttgcgacagcctccgtgacaattccggcccaaaatgcaagtagtgcatggctttgggcctgttgcctacaaactttcaggacgtattcgtttaattcggaaaagaaaggcttgttcgtggctgcgctatgaacaagcgggtgccttggtggattaatgagaccgttcttgtatggaataaggactttgaatgctggcgtaagagtttccggaagaatagagagaaggttcaagaagagcggcgtcgtatgatacggcaaaaacgtcaataatacggcggttgtgttgaactcgtggatcctgtcacataagtcagccaccactcctcacgatctgcacctcccctcacaatttattcttacctgaaccttctaacaagccaatccacagctttcactgcaggactcaactggagcctgccgccaaccagagctaggaaagcttcaaccacagtatccagttctttattctgggctacgttcatctgactgcggtcctccgctttgctctgctcgctgaatatcgtgcgatcaaactccgtaaaccgggggtccaacgagcataactcccggaatccgtcataacaaatatcatagatcgcatcgaagtcttgagtgccggcgacttttgggtcaaaaataagtgattgtgagtgtaacaccctttgcgccttaaggtcaagctcgtgtgccgacttggccgcaatttgcgacagctgcgcggcgagagacgaagccattgtgaagtctcttttggcgggctgttccgcggacttttcttgttatttttgtattggtgctcacacaattgcacagtgacccatatccctaagacttttgagggtagtctttctttttctttgcgaaccgagggcaggttcaaacaatttgaggtaagtcttcagctttgcttgaccaaaagcaaatggttgacttttttttttgccagccatcccgaccgcctatcggagaatgattcttccgggttatcagaccgcggcgcgactcgataaggaagatcgagccaccacgatggactcacctgggtctcaggttagttagcctttacttacatcttagtaaataagaggcacagactgacgaaaataaagggtgtcccgcaattctccagcttccaacctccccctaccgctcctccggcccccgctaccggctcggaccatgaacgtcgccggcgtcgctcgcgccatcgtcgtcgcgcagaccgcaaagagtctccacgctcacgtcgccatgaaccgcgttcggacggttaccgtcaacaggcgacagatgaaaaatttgagaagcgcctgagtggggaaggaattgccgatctaaacgctacaaaagatgagccgaataaaggattcgtcgtcgacagccgcggcgatcgcgacaatacacgttacggcgtggatcgttacgaggtccctgcataccaccgcaatggcaatggttttgtacttgggctccccggccagcgcattgattaccaaacgcgatatgaccaaggccctcttctccttcttcgccccgactcaggctcgtcaacctccgcagtcaagcccctctccgccgaaaccctgtctgctttgtccgccaatcttcccgttcgcctccggtctgatcttaatgccaaccttgctgccgagaactcacatacacaaaatttcatctcaacaacagtcccatctcaatccggcgttgcgacaactgccaacctagatgatgaaccaccgtcttatcgctctatcgagatcccggataaatccgaagaacaagcgactgaggatgatgcgaagaccttcattcgtcttgctgtcgaagctgagattttgaatcgcaatgccaagttgaacagcgcagtggcacaacatcctaatgatattcaagcatggatccgtcttgctgagcatcaagaacttgccgtcaccggcgggacatctggcgatcggtcttcctatcgcgatcatatacaacttgtggcaagagccaagctttatgtgtatgaaagagcgatcaaggccaacgcacaaaacccagaacgcgatcatcttgtgctgggccgtatggaagaaggcgcgaaagtctgggactccacaaaactttcattggaatgggacggagtcctccgccgtcactctgagttcatcaatatatggattgagtatcttgactactgtcagactgacagtcaggattttaactttgacacttgcttcaagacttatgcctactgtttgaagctacattcacgtgtcggcttcgggccgcggaaaactcttatcaggtcatacttgctgctccgtttgaccctgtttcttcgagaatcgggccacgtagagctagctgtcggtatatggcaagcggtgctcgaattcacatgcttccggtcagcacatctaaagggaaagagagaagaggccctagttgagtttgaaaagctctggaaacctgggcacatccggattggggagcctcattggcaaccctggaacagtggacaaacctcccgtccctctatcaacgagcatgtttacacttctgaggcgaataccacagagttgttcccatcctgggtacgtgcagagagagagcggatgttcaaaaatcgcatgccgtcacatgcctttggtgaaactggagagaatgacggtttccgagtagtccttcttgaagatctcacgcagatacttccttatttcttggatttggaagaaagccttggttccctagttgatggcttcttgtatttctgccatttgcctcacttgacaatgcctgcgaatatgcacaccagccggctgtggaccggtgacaatttcgtgcgaaacgaatatatggatgatcctcgaaacacaatcgcggactggatcacttttgagaagtttgcctcaaccacaagccttgcgcctttcgcattccctcatcagaccttcgttcacaccaccgatactcttttcgccgatccaaagctgtggttctctgctttaacgaagtgggctgcaaccacctctcattcttcctgtgtcatcgatcccgactttgtaatcttgactctccatgcccttgtcgatatcttcaaagatagccaattggctgaatacgctattgcagtcactttcgcgtgtgacaacgctctgggcaagaaatacggaaagagactcttgaaggaacgatcatcaaatctgagactttataatgccgttgcgctcatgtattggcggactggcgatcttgatgttgctcacaatgtgtggtccaccgctttgtctatgagccagaattttgacgcccgcgagctcactgactctgcacttctgtggaactcttggatatgggaaatgcttcacgctgggaacaagaatcgtgcttcatacctgttgcaggccatgccttataatcgagtccacttgctatcatacgacacagctgatgaacttgaaatcaatgaaaccacttttcttagggtcaagaaggcaagttctcattcgttgatctcactgaatgctgtcctaaccatccacagtgcttgtttgccgctcagaggaatgccttgaagttcaagaaaatgcaagcatatgtagcttacgtcgactgctatgccatcgccctctatctcatgggcgagcagcttgaagaagttcttgatgtctacaatgacgccgccacttctcttagagtcttacccaggactgatgatgattccagggtgtttggcggagaattgctacaccaagcacgagcacggatcatttaccactatgtggagaagcagagtggtcaattcagacccgctgacattcgtgcgcagctcctggatagcctggaatggtggcctcacaacaccatgttcttgtcgctgttcaaatggaacgacgctcgtttgaatctgagcgatcgaacccgcgatatcttcgacgtcactatcggggcgaaggccagggccgcccggcatctgcaagggcctgccccaatctaccgtgtacccgtcacaactcacctttttagcatctatgctgagatgggtcgccctctcctactcggttcgaccgcgcactccattcgggcagccttcgagcgggcgattggtgatcatggcatactcccgatcgggcggaccccaactcgaaagagtccttttgagctggcgagctcaacctccgcgcggaccagcctcaccatctggaggctgtacattctctacgagctgtacgcggagtacaacgtcggccgcgcccgcgagatcttcttccgggccctgcgctcttgcccctggtcgaaggagctgtacctactcgccttcgagcacttgcgggcggatttgaccgaccgcctgccccccccccccctccaccggccggggnnnnnnnnnnnnnnnnnnnnnnnnnnnnnnnnnnnnnnnnnnnnnnnnnnnnnnnnnnnnnnnnnnnnnnnnnnnnnnnnnnnnnnnnnnnnnnnnnnnnnnnnnnnnnnnnnnnnnnnnnnnnnnnnnnnnnnnnnnnnnnnnnnnnnnnnnnnnncgggcgtatttgcccgcccgcctgccccccctcagtctcaaccggcagggagaggtcagctcgtcggggttcaacgctgcagagcttcgggctttgtacttggagatgctgcgtcgtggactccgtattcactactacttggaggaccctatgggccgagtaggcccagagggggtctgatactggcggctgggcggtggaggaggagaggggagagaagagtggagaatacaagaccatgagcgggtgaagggggtgacctagatgggataaaagtaatatcatccaattcaaaagtaaaaaccccgtgctttgctcgatatccgggggtctagcagcgtagcaacgtagggagtctcgaatcgatcacaactttggtccaaacctcggacactttccacactaaagtcctggatgaacaatctcctcacaactgcagaatcattgtgccactgagcggaggacgcgaggtgggaatttgatttttaccaatcttgcggaccttcatttagtctaggtatgtcaatataaaacagcttctcgtgaacttcatggcaggcaaatgggacaaaattgtagttacaatgggcctactaaataaaggagccaacatatcaatccaaatagagtaaatgccatcgccgttatataatctttctttattagatacaactatgcttcctcactaaagaaccgattcttaggtctcggtaggccaaagtgctcacgcagtgtcgaaccggtatactctttgcggaaaagacctcttcgctggagttcaggaatcaattgatccgtcacctcttccaggccctgtggcaagaacggaaacgtgcacgtgaaaccatcagaagcttcctcgcgcaaccagatctccatttcatcggcgatatcgcttggcgaaccgaggaatgtcagccctgagtatccaccatatcgttgggcaagctggcggatcgtgagtccctctttcttggctagcttttcaacggactccctgctcgtcttgctcgcattggtctcgggcagatcgtctggcaatagactatccggatcaaggccactgacatccactccaagtgagattgacaaggaagcgatggcactgtcgtaatgcaccagactatccaacttgagtctcttctcctgcgcatcttgcttgctatccccaacgataatcattgccgcgggtaaaattttcaagagatctctcttccgtccggccttctccactcgccccttgatatccgcatagagtgccttcgcactatcaatatcctttggactgcaaaacacaacctcggcagtctcagccgcaagctgtcgtcctggctcgctttgcccagcctgaacgataactggccatccctggggtggcctggcaatattcaacggccctcgaaccttcaactcatcaccggaatggttcagcacgtgcattttcgcaggatcgaaatattctcccgtctcgacgttgcgagtgaaagcatcatcggcaaaactatcccacagcccggtgacgacatcataaaattcgcgggcacgcttatatcgatcaccatgggccagatgctcatcgaagccgaaattatggctcgactctgggtttccggtagtcacgatattccacgctgctcgcccaccactcaggtgatcgagactggcaaatcgccgggcaacatgatatggtgcgtcgtaagtcgtactagcagtagcagcaagaccgatcttctccgtcacggaagagagagcggagagcagagtaaatggctcgaatgaggtgaccgtgtgactgcgcttgagagcttcgacgggcatgttcagcacggcgagatgatcagccatgaagaaggcatcgaacttggcggcctctagcttttgggcgaactgggcaatgtgtttgaaattgaagttggcgtcgggatatgagcccggatagcgccatgcacccgtgtgtagcgagactggccgcatgaaggccgtgaggtgcagctgacggttgggttgcgagtcggtcattgtggagttgatttgggtatcctctaggttggatttttcaatctttccagatgtgattcatacaaataggttaattagaatcgctggggttatatactctgtaccccgcctgttgtggcatttccaagccgatttataagcctcgctcacttggccttgatatggcgtgcttagagctgcgtaactatatatagctgtgtatagttgtccaaccattctgaggtcctcatttatcgcaaatcttatactttgaaaccctctagtcaagaaaatattgaacgaggggtaccctctgttgaaattcaatctgctgtctatgtagaatgacacaataaaaaaatccaaaggaagcaaagaagaagcagaaaacaaggcactcggatgcatggcagatcaaatacctgcgtacatacgtaggagaattctagacctcatacaagccaagcaaagcaagaaaaagaagcaagcaaaaagtcgaaaagacgaactccccttatctgcgtaaacaggcagtggaatttatcgcaaccgaacctaagtggccccggttatctctttgatgtccgcaataagatcctcaatgtgggtgaagttggcagtcagtgtttcctcccgacccgcaaaaagcaagccgactaccacatgatctcttttggtataaaccaaggaaccggactctccaggacgtgcaaaaagacggaaatcggtgccgctggctatcacggtatgttccaccgtcggaacagaagttttaattccatcaatcatttcgtgcttgacatgagcctctttgagggagtagtcgcccccggagtacccggagcgttgtcccgaaaggcacagccttaagttgtcgatcttgtcaggtaggggcgatccctggagtacatgccgcccgggagtctaatgaacagttagattcagcgtatatagtaaggctttcttccaatagccaaactcacgacgttgctcgacaatccatcatccggtacctcgaccaagccccaatcgcagttgatacggtgtccatttgcaccctgtcttgtcctgagcccggatgccacccagacactcccgaatcttgggtcaaaatctttgatattgtcaaggaaaccccgcaaataggacaattccttctcgttcttcagatatttggttttctccgttggtcgaacattctgtttatgggtaacgagtaccccagagagctggtgagccgatgtgtcgattttctcaatctcctcatctagcgcggttctcttctctcggatcgcacgagagctggggtgatagactgtcaaattgcgtgaacttgtttcattggggccgatgccgaattcgggccatcgtctgattatcctgatcgtcgcccgcggcttaccctcctccgttcggttgatgacatggaagcatgttacggtaacaactttctgtgtgccgtcgggcgatgcggaatatattaaagtcaaggccaatgtttaagctggagctccttggtaattcttgcgtgcacttgaagatatatcaaaggataggggtgttccgactccaaaggccaaaattgaaatggaagtcgggatttgggatcgtgatttcgaaattgatgtgaccaagctggttttcggatagattttgccagatttggcgacaggcttgtacccaagtgtcgctaaatgtgtcacgagttgcagtgatgatcaaagtcggcgcgggttccttaacctttagaggccagtatttgtattgacattttttgatcttgatggatgttgcattgactttgtactgaccaagaaccgaaagaatcattttatgaactctgatggtttcgaaaactgtccataaaggggacttgccgtccagattgaaaactatcacgggtagggaacagagatatggccctccagcgcgattttgctcattgatgaatccatctgaatcgacctgccactggcccgggtcgtgaatactatcgcagctggtccgaacacgctggccatctcgaagaggagaggcgtatgctgctaggacttgggagcttctcctcctcctcctctgattcagcatcatgctgagacgatttatcaaagctttcgatggaggacgattcagatttggcaccagaggagctattcgaaaccgcagaagagtacccatcagaggagccaccagggaacgtgttgagcatggcgctagggtctttctggctagagctgggggtatgaaattggtcgttctcagagcagctgtcacataggatgccagtttgaacttcactaccacggtcatactgagcagacatgtctaataaagtgctagtgctgacttcgagattcttctgggcaggcgggccaaacgaatccccttctctcgatttaggttgtatcgcaatagaagtctcagttgtgtgccactgcacaggcacgctggtttcgatgtcacagttcccctcggcagacgggtcaggcatgatgacagtgtcagtgtcagtgtcagtgttaaactgagcaggtatatctgacgaagcgctagctttttcttgagtaggcagttcaagcaactctatgggtagaggcttgaggctcatctctgtagaaatctcagggatgattatttgaaggtacaaatgataaaagtgaagtgatgtagaagagaaagaaagtggagtgggtggagaagatatgcggctcgacggccttggtaaaccttaaatttggatacacagggtcacgtgatgaactatttgtctcacaggggcatcctcatccacaacacacccaaagcgtctcattattagacccacaattttcccaatagcctgatactcatgtgatcaagtgctacaaactttcctaggaggaggtagtatcaggaccatcgcatttgattgaacatgtaccgacacctatccacgcgtgtttggtgctacgttcgtatgatacaaggcccaaagcaatattgccagtcaatcacgaaacattcacgcatgctctattctcactcaggtaggtatgcctgcctaaacgtgatttaacattcactcattcgtatcagactggaattctgacgatgaattctttaaattcacgcgtagtcgctttcttgtagacgaggcggaaaaccttcgaaggcgagagatcaaattcaacttgaataggctcgcaagtgttgcggcggactcaatcggcgctgctcaatgcatttccatcatcaagtaccccgacggtatgttcaacaaaacattccttatgacgatggaagatggccgagaagtcgtagctaaggtgcctaaccctaattctggtattccccactttaccatggccagtgaatttgccacgacggacttcgtaggtttatttgaaactcggtcgacgccaaatcttgctaatgcgactggattggggggctcgcaaaaatcctcaacacaccagcacgtcatgtccaggtatggaactcgcaagcaaagtcacatcctgttggggctgaatttattatcatggctaaaattgagggtatcccgctgtcccaagtctggagcacgatgcaagtacactagaggcttaaagttattcttgccatgacaagtttgcgaaagcaatggctcagcgtttcattctcacattacggtagcttgtactacgctagagacgtgcagttcccagcaggcaaccactatgtcaaggatggcatggccgtcaaagattcagagtttgctattggccccgctactggtcgggattggtttgatgcgggcagatcaattttggatattgaaagaagaccatgtacgtcagagtctgtattttctttctctcagctgctgacgagttcgtaggggcttctccaacgcagtacctgcaagccgtcggaacgcgggagattaaagcaatccaatttctgaaaccacccaaacagactgccttattctgtggcccaaagctccaccaaccggacgcagaaaagaagcttaccgcgctagcatggtaccaaaagatcgtcgatgccattatcccaaaggacacctctattaccaacccatatctctggcatgatgatttgcatgatgacaacatcttcgtagacccagacaaccctgaaaggattacgggtatcattgactggcagtcttgccgcatctcacccctcatcagccataacctcgatccagctttcctcgactgggatggccttgagccagaaacgctcgatctagcaccaagaccgacactcgctaggctttcccccgacgaacggtccgcggctatgcacgagtatacagttcaaaatgtgttcattggatggcgaaatctcatgcgtgctaagaatccagacttatatcgggtagtcgaattccgaaagacggcagcgttcggactgatatttctcgcccaccgcatgttcgaatacggtgaaccgcacttcctatcgcttctagtcgatttgaaggacatgtgggcggacttacccggcgtcattagcgacattccattcccatttgagttttcggaaacggacttggagcgcatcaagctggactgcgataaaagtacggagtaattgtcgtagtggcctgattcgtcgcccgtagtccgctgcagggttaccataagttataacttagggcaggcttcgatgcgcagtgttgatataggtcataataaatgccatggtctctatttattgtctagagagtgctatatcggttctgtttcttattggatattattcaaagaacattgtcaagtctattgccatatattcctaccacccagcattcccaccgtatccacgtatattgattgcttctcgccgctcgattcattcatactctcaagatgtaaaatccgtttagaagagctaacatagagagttcatgaaatcatagaaaagtataacaaaaagagagattcgtgattcgtgtcatatatgatagaacaaaaacaagaaaaagcaaaggggcaccagaaacaagactagaagtgttccttccagaatttgaaccggacatccctggttgatgaatatttggccgcatcgctaatctgcatggcagcagtattaggaccacagaaataaacaccaatttcggtggtagcagcgctctgcagacccgtcatgtaggactggtccagcaagccaagccgcatagccgtgaagagtcgcttgaagtccggacgaccaaagttcgtccgactctttagctcggtgagagggtcaagggcctgcccgacagagttgaggtagatatttgcagcggtatcggcgtcgagacgctgtgtgaggtaggtgtggatacgcaagaactcggtgcttccctcgctagcagcggtgttggcggattgggcttcgagggaagatagcagagcttggaaccactcaaatgacgaggtatccttacagacccagataaactcaacacgtcgcagtcggcgaggagggtttggacttgagcggagatgccaaatgttcttgagaatagatgcccagggtgtgacgccgatgccggtgccgatgagcacggcgatttcgttgtcgaacacgtcttcggcgggtgcaccatatggtccatcgatgcgaatggagggcatggtctgtccgttctgcagggcaacttcgtacatgccgttgggatcgagaccttcaaggtctttggcttgggcgggaccgcaaccgagtgcatctccaagtgctcgggtgaaatctccgacttgacggacgtgaatgctgagatatggatcaaaaggacaggaggtaatggtgaatggatgccattgggtgctggaaacatcaggcacttgaaggaataaccattgtcctgctttgtacttcatgcttggtttgtggaactggatctccatggcggctgaggttcttttgttagctgaggtcaattcaacatttgcgagagaagatcataccataaggatggcgaatgacttttgtgatgactgtcacgcgccgggatcggatctccctgtacagtcgttcgaagagatacaaagttccaatgaccaactcccatctccatccttcatagccaagacaatgattccagaactgtttccctgcgaaaggagagatagggctcgcggtatcccggacaaagcacccagtggagtgggtgtagagagctagcatgaacggaataaaaaggtgatgcgcataccagaaggtttcatatgcttgttggcggatgcggtgatgtgcggttgtatacatgagcatcatgcacaagagcatgacatggccagtgataccacctgcgcgagcaaaatggatctccactgcaagttctgggcggagttgcctcttttcgatgtggtagaagctacttagtgtcagtaaagtacccgcgacaagctgtatgaggaagcagcctacttgacatagtgagcagcagtgtgaatagccgtgaatactagtatagaataagctatttgccgatggaaccacgccgattcatctagtggtagccatttgatctgtggtctgagccatcggaggacgttccgacacataggaaataggattaaagtgcaatcgatggaaagaacgagacctgcacctcgcgatatccagactgaatagccaagtgtatttagtgacgccaactttggatttgatgcctgcaggtacctataagaatgtcagcaacaagatctagaagtagaacatcagaatacataccatcctgcagcaaaaatcccaatatgtacaccccaaaagaacaaatggaacaagaccttcgaaacggtcaagttcgccctcttccaccaggaatcttgagctgcggccattctttctctgtgcttttgagaatgtcgaccagcgacaagtatttaggcaataaactaatcaaaggagtgacgggtccagacggttgaccagcaacccggtaatatacactgaaattctgtcgaaagcgaaatctcctggctcccttttgtggcaagactccagtgtcaattttgaccggtcggtgctttcagagttcgtcaacggcgttgtttctccatgaatttggcgtaaatcaagatttcctggggtaattttcgcttcgaagttgaagagcggatttgaaaaaaaatccaaatactgttgaacgcctcgcacaaggaaaagtacgctcgaaacttgtgatagtactcaatcaagatgtatagaaataggatgtgagttgtgcgccttgtcgcgagcgctcttgccgggggattcccctgcacgtgtcctctcgaataaaagaggttattgacacacttgagataaatatgaaatcgatttgattcaagctggtccagacatggttgacgtcaatagatggaataagggcaagatcggagatgggttggaggttcagagaatcccagtgttgtggttttagctgcagggatggggggcagccgatctataattacatcgcttctggcgggcaatactccgtttaaccgactacgtacacgagtctacaatgtctgtgcttttagaattctcctatgaatgagtggtaggaagaccaagagaggaagtccagaggctagaatcttgatcgcttgaaaatcctcgttagtttttgcctgttctctcccgactgctgtcttggctgattcttccaagcctttcaaaagccctgcttttgatcctgggcctgggattttattaatactctgagaagtgtgctatttttaatgaccgttcgtagcaggtacaccaatcatgaaacgaagtttatacgccctagagtccgaccaccgtgccatgttccccgcgaagaagcgagtctagtgggaaaaaggaagcaccctgttcgaccaatcctatccaattcggcagttttccctgatcataacaggcttgaacaggtgcaagctaaatcggtcgccgaagttcaaagagattaatggcccgggggtggcagagaggctggtgactgggcaacgtcaaactaggccagggaaagaaggttgctaagaggttggcctatcagaggcctcctgcaagcgctgttctctcgtcacacggagccccgagggtcgcccagcgtcggtgaaaaggcaaaaagcctgccattctgttcaggatccatacggcggagagaatagaagtttcgccaaatatagatcagtgatgatttgaactatattgcgtgttttccataaactataccttttttccgataaaattctccacttggcactgcaagttaaatcaggcacgggctgactctgcagaagatgcagaaagacggtgtgttgcactgaattggaatcagggctactgtggtcatctgatctggatgttccaaacttgtctctacaacaaaactgagaccatgcagacaaccccggacaatccaaaaaacacaggcctcggttcaaatccccaggaataataaaaatacaattcgaatgtccatgagacttgaaaatgaaagcccctgtgcgtgccatgcatgcacctgcagttcatcacgccaagcccaagcgctctggcctgtgatttgccgacatccacttcgcgatccgctccgtcacatcctccgctcgccaatcacacagacttcaacaagctcaggaagaggggtgtcaaggattcggggacctttcggccagtgattggtctacgatgcttgtatctgtgcggatcacgctttaatcctatccttcttgcatgtgtcccaaccccatgcagctcgtcaccttttggcgctcgaccatcacatcctggcaaagtgttccgagtttgtttgagttatcagaggggtgatttgtctaagtatagactcttatacctaaccccccgcctgcacgcatgtcactcggaacatactttttttttcttccccatacgaactacggtaccacgataagcccttgcaatatatccgctctccatgtgctcggattatccaactcaataaacatctctatgtcttgctggatcgtatgatgaagtgattctctcacagaatctgccgcaactatttggggtttgcgacatctgtcgcccaagattagccttgcactttgtcacacaagtgactttatttcctccgaggtcttcgctagctaaagcttttccacgcacaacaatacagttcccatagttcaacaaaatgggcaggctcatcaagaaccactgggggcgcttaatcatcctcaccgcagcagcttgtacgttgctatctaaacccccaagtcgaagccggcactgacatattcaaacagaccaagtcgccagcgctatcgagggctttatctggcccaaggtattctgggactttatctccaggaacctcgatgcggccgtcgccccagtacccgttcttcaaatcctaaatctcgtcatgggcctcgtgggcatagcctgggaatggcctctcaagccatttgctggctcactaccgcaccgcagcattgaaatccgtctcatcatataccccctcaacgccctcctcgcggcgcttctctatcaaggcaccgaccctgcaatatattatttgattggcatcggtgtctatttctgggcctacagtgaaggcgaggtatgttgcgcatatttttgacataggttgttcttatgctaacgagtggatataggtcgtctgcccggagccttggaccttgccgaaacgacatggactatttaaagcataacattggttcagtctggtgcattgagtgtagcagacacatatcatttagatatcctaatacataatgaatttgatgacttgaaagagaagcatggcttgtatcattaatctccatcatcgtcatagagaatgcgtggggaatattcctcctgcagaattctcaacttgcatagacctaaattatcattttctccaattgacagtcataaaactgttcacttctcatattctcatcatacgttgatgccttgtcaaggaggcataaacacgtggacgacccacctggcacgtgataccctattcaaactccaagaaaaacgtcatcttgacaataatactttcatgaaagctcaagaagatccagaagatacattataaatgccttgtgcatcgtttatatgtcatggacgactttagggctgcttggaacccgagaactaaccaaatctgactgacaccaaacaagatggctccgtctacagaaatccaatccaaagtcgaggaagacgagctcgcccttgaaactgtcgaggatgtcccagtcaacaaactcaccagcttcaatggccgactgcagcaatacctgcatagcgggaccgcagcgcacgaagccccaactgcctctcggggtactatatcgcaacgccgcataaacaccaagaccgaatataaaccagacattaccgaacgtcaagcaaaagccacaatatccagcccaaggcgcaagagaacagcgtcagcaacctcatgcaccacccgctcaaagtcgaccacaatagccacgcctccatccccaatcccacctcgccaaagcccaaacaaacgcaagcgcagcacagcaaatccccaaaccccacccatacccgcaatcgccggcccttcagcgacagaatccctccttcgcgacacaatccccccaaacctgatcctcctactcgtaggcgtgaatcccggaataatgaccggcgtaacggggtacgcctacgcgcatccgtccaacctattctggaaactgctctattcatcagggataacaagtgtccgccaaatacccgccgatacatacaagcttccggcgctgtacagcgtgggcaacacgaacatcgtggagcggccgacgcgcgacgcgagcatgctcagtcgcgcggagatggatgccggcgtgccggtgctcgaagcaaaggttgctgcgcagaggcctgaggttgtttgtcttgttggaaagagtatttgggaggctgtttggcgggttagacatgggagggggattcggaaggaggagtttcggtatgggtggcaggcggagacggagaatatgggtcgggttgatgattgggctggggcgccggttttcgtagctacgacgactagtgggcttgcggcggggatgaagccggcggagaaggaggctgtttgggcggagttgggaagttgggttgtgaggaggaggggagagagggggttggatcctgtggtggttaaggaggaggtttgatatgggtttgcgattttctgtggctttcatttgtatagatgatgtcgctgtaccatatactatcataagctatgaccattgcttttaaatatattgaacggctttacaaatgggaatgttcgggattaagttaaaagtatttgtatttatttgtaagacgagtgaggttgctcatcattcattatctcataatatcaggtgcagaagcctgttgagtaccaagatgcaaagatgcaaacccagaaacagcaaaaactccctctaagcccattccagggctaaagattgagggtgttgcatgacgtttccccaaatgatcaagcgccaaagtgccatacaacggacgatcgagggatgtgaatatctcagtagaggtcaatgtgaggggtaaaggaagggaggtagttgtccagggcgtggttcaatagaacatcgatgcctggctagcctccccattaaccccgaaaggagtagagggtagatttagcggctgccgttggagtcattcttgccgccctcacgctcgcgtgcctgttgaagttgagttagtatacagaacctcgcaattgatgcaccgaagtggaactgaaacttacagtggaagcctggaattcgccgccttctaggatcttgaccatgcattcatcctcgttggatgtaccgaattcgttctgaagagagctcttgctggcagtgtcaaggacgccctgggctccgtggctgcatccagatgttaatgatctgacgtatagtaaaagaagtttgaaacacttacgagtgagtcaggaagatcttccagccattaagaacttcggtcaggggaatgctgcggtcgctcttccacttctgtagactctcgatatcatccacaaagacaacgaagtcgtctgagctacccttgtagaagatcttagaagcagtgtcgtttccgcgagccatattgaaaggatgtgaggtttgaggttgagagattgaatagatttcaagatttgaagatttgaagatatcagaaagatattgatgaatgagaagaagggaaaggtaaaaggtggtggtttaatagtccgaggtgggagagctcaggtgatgatgactgatgacgtcaccctatgagctgatgcaaatagaagaagctcgcgtgttttgttcacgtcctctgcagtctgaatgggacaactaaccacaattagtcagagtggatagggcttaaatggcgtttgtcgttctagtcccttgcttcactacagttcttacacagcgcgccaactattccagcaaagacgacgtcataggagctcccctgcccgctgtcggatccgctgtgacgccaaacgtggggtagttctgaaagagccaagtggcaagttggaggataaagaggactctgctggtattccaattaataattacttatagtccaagccacaattacgtttttgggttaattataatccctccttgacttcaatgctcccgccgaatgtaccagaaccatctcaaaaggacaacgtaaaaataggaacctcactcagcatcggagcgggtctttttcagcttcttgggtgccaaggcactaaacagattcttcggagatgaccacttttggggagacgaccacttcttggatgacggagatgattcggaacttccatcttggctccggcgcttgtcgctgcgaggtgaagaaacagacgccgtggggttcttaggtgagcctttgaaaaggaacgtcttcgaccgccgaggcgtggtgggcgtccgaggcacctcacattcgacttccttatcctcccctatctcgctgctacctgctgcctccttgtccattctctcgttctcttcgtccgagtgcatgtccgtcgattctgctctcgaatggaaagccccgacggagctcgaccgcctggtaaaccctggacgaaggctgagccgtctcatgatcgaaccacgtcggaagagatcaccccttccaagaaccattcctggcaatggaaggaggtctcctgtgtagatgtctgagatcagtcgctccagccggattcggtctattcggcgagcagtcaatgtcaatgccgagcggtcagtagatgtcttaggccgttcaagctcgccttcagcctgtgaggctgtttcttcggtgtggcgtgggtcatttgttttcttgatgactacatgttggacacggaacttgcgggagattgccatagaatccatcgatgacctccgcgccatagaagacactgtgtattgaacgtggtccaaaggtaacagttggagggttaagaaagaatgttttcttggttcccacgtcctgggttgggccacttctaccaaagccgccgacattttgagaatctcagtattccattgcttttcttccactgccgatgatgcactgagaacaaattcgtagttctcatctttattttcaaacaggagcttccatgaaaatatacatccgtatgagcacagtcctgatgggttagatatcggggataaatctcagcggaaagttactcacctcgtccattttgaagcgtatcaatcttgagagagtctagatagacacaagccactgcttccagtcgacgcaggtcatcaatccccttggcaaagagaaggtagcgttgaaaaagtacacagaccatgaactccccgttagtggtgtccattgtttgatatgtgacatggagcacaccgcacatgaccaacgggccaaggtctttgtatatactctgaagtgcatgctgcccaaaattcagtcatgttcatctcatcaatgaagatcttgtgcctaccgattccgagatatccaccttatcctggagaacgattgtcttgtcgatacgatctttgttgatcgggtttccagctgataaattgacccgtgttactagcaaccgtatactgtccaacacttgctggattccatcatgagaagacggacaatcactgacaggagtagacctgagcagatcttgtaggacaagggggtatttgcaaagacgttggatgggctatattccggttaatggtcgaagcactcatcatatttatctcacgcaccttgattaacaaatcattcaatgtcattgatttgtggtcctcttgtctgcgtcgctcagtagacgcgaccgatttcgaaagtgcctcgattccctgatcatatatcgtccagttggcaattgagcggcgtaggagagcaacatcctgtgtcaatagttcatagttgctgcaaaattggtcatacgctgggaatgaaagtgcctataaaatgcccagtcagtgcatacaatcctatctagtacaccaatgcttaccaatttttcaagttcacgggccacttccagtccctctgttggttcagcagtgagtgccatgaggcgctgattgaccgatgccttgagtgatcgagtcctcaaggatcgttgctgaagtccctttaggctgcccagatcaagggaccctatacgtttagtgattccgcgagacgtaagctcagaggcacctgcctgttgggcctgaggtgctgacatgggagatgctctctgaagttggttcaaaaagcgttcatgtattcccaaaatctcctggatgttgtcatagatctcgcgtctcgtatcgaagatcgtaaggatctatgtgtttacagagcacattagcatcaggctaaggaatgacagtcagctcaatggcttaccccgataagggccttcagaccaagtacataatcagactcagtctcaacaagttcctgtaggatatgacgccgtctggtggcccgtgtttccgcagcctcatcagtattctggcttaagcttggccgagagctgtcaccagaatgacgcacacccgatagtgtactctggtttgttgcgctttgaatcgttgtcctcgatcttatcaagctctggcttccaatgcttgctgtggttgttttgacggttccgaggtgcgatgagtcggatgcactcgactggtgaccttgcgagccatgggaagatgaatctgaccagccctccacatatcgccgttggcatgtgggagattcgtgtttccgtcctcggaagctatctatccatttcttgaatggacgagaagttgacttatcggctagagtcaccccaccgccgctttcgaacttctcttcggactcatcatttagcagggcttgcttctcgatgttcatctcgtcctggtcggccatggtcccaaatagcgatcccgcccaatgaaatacaggactcaggttccgagggcatggagaaagaaaaggcggacctaaccgactacgcaaaacaacggaatggaacttcatggcgagggaagagcaacaaagtgtgcctgcctcgtctacattcccgacgttggaaagtgcatgtatctaaaacagaggaagctgccactatccaggcagtacagagtagagacagcgaatttgaattccatccatgtacgtcatcaggtgaggcagcagtatagctagaattgaaatagtgcattttgattgttttatattaggagtaactgagctttttttttatatcaaacatccaagtgcaatgtcctgaaagtgaagcttacaacttgaagtccacgtcgtatacttcgagtgccaagcatcgccgcttatataaaaaagtgggagctccagggctgcccaggtgccacccccagacccacttgacgttcttctcccactttctttctttgctcaggaaatcatcatgaacgataacattcacgccccaactgttgcctctggaccgacgtccggggtcactccccgcgatctgtccaaactgtcgatgccagatctgatgcaggagaaagaacgcatcgaggcggaattgtcagctcttagtagcgtcctccagtcggtgagatttctggcctagaagttcccatcgcggtttctaacaagcatttcgtgttagcatggagtccgcatgacttcgtctctcacaaccttcgacggtttcccccgtgatgatattgacatcgcgcaaggtacgcccttaccataccccagtcgatcgggacatatagctgaagggagaatgtagtacgcacaacgcgcgtgcgcattattcacctacggaacgaccacaaggaggtgatgcacctcctcgagaaaggtgtccatgcgcatttcgccaacctacaaaatacgcaagacgctggcccaaccacaaatggcactaacgtcccaccggctgtgcaatcgttgacaaataacaccgtgttggggacaccgttcgccaaggtcaatagcgtggtttcgggaagtccagcagaccaagcgggactgaaagctggcgatgcaattcgaagttttgggaatataaattggctgaaccatgagcgccttgctaaggtagctcaagtggtcaaagacaacgaaggggtacgttcggttctcccacgctctgtcaaaatacccatatatctgattcacttcctctacagcgggtggtattggtcaaagtctctcggaagactgatgaaacgaacactgacaccacagtggacttggacctccagctcacccctcggcaaaattggggcggccgtggcctgctaggatgtcacttggttcccttataaggggtacttccatttagaataacaagcatagcccggttttgctttcaccgtgtacatgataatatgtactgcttatgaataacgcgattaatgccatacgtcctttctacctgatttcacattatactagttaggctcttgtaataagactggggaaccgtatacatctgaagataacttggcaggcgaacgacctgaccatgagagtttattccaataacctaacacaagaataagtagagtccattgtgaatataatacttcaattgcaataaacattgtcatacacactaacttcacatatgtttgcgccatattgacactacgtcagagcgcctcaggcaaacatccacgtgactcccagcaacggggcaaaaattccatcgagcgccattaattcattccccttctttcacccctcccttttatcaacaacccgcccccataactacggcgcgaactcttgcaattttcttctcttcaagtttctctccaaactatcttaatcatggctgctgaaacccccactttcaagctcgtcctggtcggtgacggtggtactggaaaggtaagcgcattccagcctcgcgatctgattgttgatgggcaagggagtggcagccatctgctcggcgctcagtgatggtcatttcatgatattgatggatacactgagctgcccttttcgttgctagcctctgcccgcgcgcctgtcaacaatactgattatctgcccaacggccccgcctcaccgcgacttcattactaaaacagtgaattccaacagaccaccttcgtcaagcgccacttgactggtgaattcgagaagaagtacatcgccaccctgggtgtcgaggttcaccctctcaacttcaacaccgtatgctataccccgccacaaaccccgcttcgcatagtgtcatggtgtcatcgtcaactaacccaacctgaatagaactacggtgctatccagttcgatgtctgggataccgctggtcaggagaagttcggtggtctccgtgatggctactacatcaacggccagtgcggtatcatcatgttcgatgttacttcccgtattacctacaagaacgtccctaactggcaccgtgagcgatcctctctctgataatgaacccctccagattattttgactaactgaactttaggtgatctcgtccgtgtctgtgagaacatccccatcgttctcactggtaacaaggtcgacgtgaaggagcgcaaggtcaaggccaagaccatcaccttccaccgcaagaagaacctccagtactacgatatctctgccaagtccaactacaacttcgagaagcccttcctttggctcgctcgcaagcttgttggcaacccccagctggtacgtcattttatgcctggattcgatacgaaccgatcaatactgactgattaccttttaggactttgttgccggaattgcccttgctccccccgaggttaccgtcgacgagaagcagcttgaggcttaccgcaaggagatggaggaggccgccaaccagcccctccccgacgaggacgatgccgacctgtagatcgttgcgctcaacgacaggtccacgaagtttccgaaatgaaaattgggagtcgctatcccttgttctcccaccctatgttctctcgagtcccatctcacaatcgacgtgtgggaggcagggagtatccgactcccggggattgcctttttttagtttgggttttgcactgcaaaagcaaagtctcttctccgaaatcacgatacaatgaaagcggatgggggatagtcgtggtttgaagacatgcatttttttcctttttgatttcccccaatcttagtagcttagattctcacatcaaatcgtccttttttccctttgcgaaatgagcacacagcgtccgaaatggacgtcctctttcgacaagatttaaaacttcttttcttttactttgaaaatctattcaccagatggatctagatctctgaaattctcgtcaagtgaacactaaatctaatctacctgaaaaaggattgtaaggttggccgtgtagacattattgaatagcagtacaacgcttcttccacgagaaaaaaaaaagaataacgccagggtatagcagtcattggcctccaaaaagagagaacgaaaggatgaaagaaacaaagaaaccgcaaatgatttcgccagatacccatcactgggatagggcagaaaatgaaatatcaatcatatcatcggactatttccagtcgatcgagatcatctggcaaagagaacagatgcaatcaagcaaaattacaagtctctcacaccctgtgtaacggataaggagttagcaaagagtccagtcaaagtagaaaacgaggaaaatagggataaacatacgaagagataagcaagttccctcgcatctagtcgggagacattcatggtaccgccctcatcgagagcaccactgataagctcacgcttctggtcctgaagagtaacaatgcggtcctcaacagtattctcgataagcagacggtgaacgaagacctctctaacctgcccgatgcgatgggcacgatcaacggcctggtcttcaatgtacgggttccagaaggggtcgaacatgatgacatgcgaagcggcgacgaggttcagaccggagttgccggccttgagggagacgagcatgatcttgcagtcaggatcattggtgaaagccgtcacagcggcgttgcgctccttcagattcatgctgccgtcgaagcgggtgtggttccagccgcggcgggccagggggacttcgagaagatccaagagggaggtgaactggctgaaaatgatagttttctcctctaagccgcggtcttcattggcttggaggatctccagcgtctttgtgatttttgtgctggggaaccagcccttctcgaggcggcgaatgtatttcttcttctcggccttgttcctcaaagcgtccttgcgcagctgggctagagacttcgccttcgttttcttctttgattccgcatcgccctctccagtagagctatcggagtcagactcttcactgctcgctgttgcttctgggtcttcgtcgtcattgggcccgttggtatcaccgcctccggcggcaaattcgggcactgaggttggatcgtggacctgcttgaatgcattggtgtcggtgagtttcgcagggtccacgggccctcggcagttctggcacttaatcacagctggaccatcgtcttcgaggttgatggctccgtttgcagttgcagagtcggaaatgcggatccagcactccgagcacacatggtgtccacatggaatgtaaatagtcgcatttttgacactgtccatgcagacagggcaggtgccatcctcttcgccgtcattatctttgatacgttgcactacagcagcggtcagaagtttagcgttggcgatcttatccacccccgggatagacggggagggttcgtttcggaaatcctgcatgagaagtggatggcagcatgcctgccgaagacggagaaggagaactagaacatggctgtagttcctgcccaacgtgcctgagtcaaggtaccgggtgatctgcctttgagtggacgtattgagttcctcataaacctggctttctctctcatcaaacacaacatggaccttctcggtgacctttggtgggagttgcaagatgggctctccatcaatcttggaggattttgtgcgtcggagacagacagacttgactagaacgcgtagttgcttcatgacatcttcgcctccccaaccagatttaatgcgtctcacgaagtcctggatagatataaatgtcagtcagccaaagaagcatacatcaattgtgaactatagagagtactaaccgccttaaactttgctgggttgctataaggccgaatccggaggaatcccaaaagggactggaaatcttcgagacgattcatcataggcgtaccagtcagacaccagcggtaggtagcattgagtcgacaacatgctattgccgatttcgcacttgggttcttgatgttctgtgcttcatcgatgatgacgcgatgccacttggcagcaggactgagaggaccggccgcatttttgaggtcttggattatcgagggatcccgcccttcctctgccaacttttccgcctggagcaatgttttgtagtgcgcagtgattgtaccaaacgtagtgataatgatatcataccttttgagctccttccagggcctgcgccgttgatggtagatcaagactgataattggtgcctgcccggcttgacatggcgctggatttcaagtctccattgatccataagtgccttgggcgcgacaatcaaagtcgggcgtcggtcttcatcctcgaatgggcgagcaaccatcagtgcaatcgcttggatggttttaccaagtcccatgtcatctgcaagaattcctcctttgtggttgctctcttctttggccttcatccatctcaggccaatcttctgatgcttcatcaacgtgactcgaagagcacttggtgtctcatcattgtccgctttagttgcctctcgaatatctttgataccgctgagcaagttcttgatatcttcaggaaactccttctcgttgtaggccctatattaattgaggttagaatcagaactacctgcttcaaaagatgcggacgtacactatgtcagcatcgtcgtcgaatatttcgctttggttgcgaaccaggtcaaaggccttgtcaaacttgtcgaatttgtcatacttctcaaatgtacccggcattgtagcgtacggatgctcatgcgaccagggaaggtttctggaggcagctgctgatgtggaatatggcattgagggatttgacaattgggagggataggccagctgcgaaggatacggcaattgggaaggatatgacatttgggagggatatgtcaactcggagggatatggcaattgagaggggtatgtcaactcggagggatatggcatccgcgagggataaagtccctgtgaagtgtacggtgatttggaatattgcgaagggagagatggcaggtggggatatgaactggatgggcgggctggctgcttgccggatcgatctttgaatgaatcggctgtgatttcttgaagatcatcgtcggaattgaatggattgagtttattgaatggggctatcggggcatatgcttgaggtgcacgattggggtttgatgaaagatgttcgagttttaccggttgactgcggtcaggaatattccatgtatgacactcattggaacgggggagttgactatgatcctcgtcggcttggagcgcgcgagccaattccgcgtctcgttccatttgaaactctgtttcaatcaacttcgcctgctcctcacactcttctcgaagttcgtttatttcatctgcatcgtcacctgccgcatcgatccagtgcttgtacaagcgctgattctcggcaaggcgggcttcttgtgcagcatctatctcgtcgagtttagatctgtgagatttaggctgcgagggagcaatcctttttgatgatccctggatcgtgggcgagacctgagatagcggacgctggcgtttacgggaattatctggagaaggctgtatcattgatgaagctggcagcaatatcgattggccagacccggccgcgaaaggtgagggtgcagcagaaggccagtgaggggacgcaaatgaatccccggggattccagtgaaagtgttggacgccttgcgtggagtagccgcaggcgtccggactggcggagtaggggatgtcacttgtggtgttggggcggcttgagaagtaggaacaggatcaccaaggagcgtggcaacctggacttccatatttttgatggtatcacgaagctcatctgcttctgcacaaggaccccgcgtcgcgaggagatcatcgtatatgtatctgtaggtatcgagatcctccaaaaggtctttgatcttgtcctcttgggactgatcgaccgaagaagccatggctcaagagcacctggcgctgaccgcgaaatgttccaagaccaaaatatctgaccaaaatatcccgatcgttgagagggtagagagtgaggatggcgatgggtgtgacggctaggacaggaggcaaaatcgtagatcaatagagctaccacatcaagtgagcgtatagggtgaagagtaaagtgttctgggagagtcagccggtgaaacttgggttctcatcagcaaaccgcaaggcagaaagcgggtagcggcagatggcagatggcacagtgatgaagagaaagaaagcatagaagcaactcatcaaattgcgtctctgtgccatctcatatgggtatttgcagaggatgtagacttacaccgagtactatcgacgattcacgggggagaatctgtggatgacggagcggattttcggacctcaggagcgaagaggtagcgatcgcagaaatgagagagccctcgtttctatagtgcaaaagatccgatgggaaggacatgggagttgatgctctttgcgaccgttcagctggccccgggggtcgagatgttcacctctgcgggggcagttgaagttctcgcccaatatgtcatcctctatcgcagtctacagcgaccatgaggactttgatcctattgacttttattgcctgcagaaaattggctatctggagagacatgttagaagactcccagaagatatttaaaagacgtttagaaggacgacaaaaaagagatgagagagagacaaatgattgaaacatctctgaaatcatcttacaccgactagatattcagatgatccaagtcctatatcggtaagggtagaggtgtataagcggccaactattcaactcccatgtaaatgaccaactcactataaatccagagaaacctcatatcaagaggtttcccagcaattcaagtactctctacagagtaaatgtatgttcaagacgttagaaattacttcatagaaggcggaggcataggcggtaaagcctgaaagcaaatcaagcccaagttcttaatggacgctatcatctactatagttatgagtacctgccaaggtcccacgagggagtcttctacttgagcctccatcaggcactgtagttttattcattgctatatgtcgtacatcagtattgaagtcctacagaaaatgttcttcagtaatatagacatatacttcagagtatgtaggtgattctacctgcgtcgctgtacaaccttgattgacataaacgcgctcttatcagaacgtgatcctgcgcgtcacgcgccaaacaagctaaacacagggctagatgatattgccctactatcccaattaggcactggacactccaggcatctggtactagtttcagccatcccggagtagtttcaagatttcgatcatgactgtgagaggttgatatgactcatatggtgcctgggctggaggaatggtcgattttcatgttataagacaaggagtacaacattcgacgtgaagctcaggctacaactgatgccgatattcagaccggaggaatatctcttacatgtagctgaaacgtaaactagggggatcacttggagatatactgaattgttcaactaccaatcatctacgtgtagtgcccatatttcaatcaattgggttgctgcctcggtgatatatatctgcaaagggtctccgcagaaacgatcgatccatcgatcatggcatcggaacagggactggttcgactatggaagacgaagcacatcccagaagttctcaagagctatctagcaaaaaaagacctcaccgcatgccgtctagtatctcgagagctcgctgtctacatcgcaccaatcctcttcgcagacattgaagtccgtttccgcagcagcactttcaacaggccatcacggatggcagctctagagcgtatcgggggacacatccaggccatgacatttaagatctcacatgatagggagaccttcttacctccaatcctggatccaatcatggggacagaacagacgttcatctacacaccacaacgacgccaacatagtggcagccggcaaatgacagagttattagtcaagcagtacccgcctctgttccatgcatctacaaacatcccatcatttgtccaggcattgacgatgatgagcggcttgcaacatctgtgaatctcctgtgagggtcagctaccaagccatcgctatcgccgaagtgtagtagattatgcattgatctcattgcgaatggcaatccagcaagcactattgaaagatctccacacctgtcattattatcagtccacccaggagcggtcctttacctgtgtccagctctaggatttggtgcttcgcctgcatcctgcaagcgctggtcccagacctgcaagctcacggtccaaatgacgaatttcggccatgagccaggtcaaccgacagaccacctcaagctcctccacgcatacctagcaagcttcccatctctgcgaagactggtctttcattgggaaggcgagaggggcctatcacctctatcacttgcaacaaagccgagcctcaacagcaaagccacaggaaagccaagtcaagcatgtcctcagagatgcgcgtcactcttacggccattgaaattcaagcatcttcagcagatggagctggtcaatgcaacaatggacgcgtcgcaagtggcgtctttcatccaggagcaccggagttccctacgagagttcaacttcgggaacgtggtgcttcgcggcggaaattgggacgacgcgctcgcgccgttgacacgactcaggggcagcgaagggtggaagcaggggcagcgcgacaccgacaccgtagatgtgccgatagtgttgactccagctggagtcagccagaaacaattatataaggcgatttgtgctctgcagcaacaaaagggaccgaggagggtgagaagcttggccaaagcgcgatcccggacacgtgagctgctgttgtgagacgcggatcatatgaagcggctgcttcggtcttcggtgtttagttggcggtgacgtcaagagcaaggggtacgtaatgttctcttccaaggaaggaatggcataggctaagaccaacaaccgtagtagtgtcgcggcgaataccgcatttgtgaaactttcaggtcccaatgcaacctcagcgtggttcgtgtggagtcggnnnnnnnnnnnnnnnnnnnnnnnnnnnnnnnnnnnnnnnnnnnnnnnnnnnnnnnnnnnnnnnnnnnnnnnnnnnnnnnnnnnnnnnnnnnnnnnnnnnnnnnnnnnnnnnnnnnnnnnnnnnnnnnnnnnnnnnnnnnnnnnnnnnnnnnnnnnnnnnnnnnnnnnnnnnnnnnnnnnnnnnnnnnnnnnnnnnnnnnnnnnnnnnnnnnnnnnnnnnnnnnnnnnnnnnnnnnnnnnnnnnnggggggggggggaagtcatggggggcgaactgtcaacacggggaagactgagagagggaccaagactatgaccggtactaatagaaatgcagatcctagtccagtctagacagaatcctggagaaatggcaacaaatagagcaaagtagaaagaagaatcacagacactgagcttcgggggaaagtgtgggggcctcggcacccgtggaagctgaaggcagttcacatgctctggcagattgtcacttatattcactcacccgccttcttgatttaccatcaccttgtactaccgctacatccaccatgtctctcaagatcggtataacccccttattctgactgtaccagaacccagctaatgaaaatagattctcacccctcgtccgccgccttcgacgtgatcaacgagacgctccaggccaacgaagccagccgcaaggatgccattaaccaggccaaggctatcttcgccttcaacctgaagaacactagtggtgaggaggcttcttggtaccttgacctcaagaacaagggcgaggttggacagggtcttgcccctgctggcagcaaggctgatggtgagtctccgttcctgatctgcggttgatcttacacatgctaatttctcttcgtcaatagtgaccctctccctctccgataatgacttcgctcagctcgtttccggcaaggccaacgctcagcgtctgttcatgggcggcaagcttaagatcaagggtaacatcatgaaggccaccaagatggagcctatcctgaagaaggcccaggtcggtgccaagttgtgaagattatatacccgtttgagaaattatataccaagtccctcatctagggcgcatattttcggcctcctattcggatagttcggttattcaactccgagtataacaaatgatcttaatatgtaccggggaccgatcatcgctgttcggatcaatgaattctaactctacaagtctcccacatgcccttgtcgcgaaacccgcccctgatccaaaaccacaaagtaatccgcatccttgacagcttctatgcgatgcgcaatcgtaatgacagtagactgctgcagctcctcccggataatctgctgaatctcaagagaagtctcaagatccacggaagcagtcgcctcatcgagaatgacaattgcacttcgacgaaggacagcccgtgtcagagcaataagttgccgctgaccctggctaaggttcctccctccagcctcaatgtgcgtctcaagattccagccgtgccgactacagagacgctccaggatttcattacacagctcatcggaataatcgcctgtcgggtccagattgagtctgatgctaccggggaagagaacaggatcttgcgcgacgaaggtaactcgggtgcgcaatgcttgtgtgctgacgtcggcaatattgatgccgtcgatgagaatgcgaccagactctggtctgatgacgctcagaagcgacattgccattgtggacttgccgctgccagtacggccgataaccgctgtggtggatcccccggggatgcgaagagagacgtttataagtgaaggatcgagatgtggtgcgtaacgaagagttgcatcttcgaagacaacgtcgctaccgtaagttggccatgcggcagggggaacaatggtcccaggggtttcttcttcaatgtggagtaactcgtcgactcgttccaccgacacaaagtccatttgaagttggccatactgcttgcacaatgcatgtgtggaatcgacaaagttgttggcagcaataagtacgaaagctaccagtcctggtgtggtattggtgtataacgccagagctgttagacaaaatgttgagcaagccgacaagccctcaaagcggtacatgagccagctctggagagaccaatagaaatggtccattccctggaacttgtcaaccacagatatgaccctgttctggaactgtgattctgcgtggaaagctcggacagtggtcagaccgtgtaatagctcgccgaagttggacaacaaaggactcagggacaccatttcgagtcgtcgtaggctctgagatgtggggaggaaacgtaggaataccgagacaaatgcgactgtgagagctagtgaaaacaacaaaaacaccggggtagcggtggcgattaccaggacagaagagatccaagtgatagcctggaaggcaatcacctggaattgctcactaatattgccgtccacgactccaatatcagatgtgagacggttcatcaagcgcccaagagggattgtatcttgagaattggtcagctttgtcctgttgagtcaatctacatagaacttacccaagtatcggaaggtcgcatggctgactcggaccaagacccgtcggaacaaggactgcccagcataatagacgatgaccagcattagaagctgagcgacaaggagtgtgaccgcttggaaagagatgatggcaaaaaatgtccatagccagggtcggacatcctcacgcggagatggtagttggcctatggggttcggaggcgtaaagtgtgtgcccatgctcaagttcgagactggccgggtgctttgcgctgacctctcactccaattcgagagatcccctcgaagagcagttgtccgctcatacgcttctccccaccctttgaggaaccatgattgcccgacagccatcagtcggtagatcgccagaatcaggacgagggtaagccaccaccggtactttccagccttaatataattccagtacactcgggccttgacacccccgtctgcccggtgctcttcctcgatgaatttatcaggcacggcagctgtctcctcctcgagggtgggttccgcttctgtttcgttttcaatatcgacaaattgcagagaagactcggtcacgtcaagcttgagggtatccttgtcgtaaacagtggcatggtttccacaaatattgataatttgatccgcaattcgacgaaccaacgtagttcgatgcgtcactagaacgatacttcgatctttcatcaaaggccccgagaagcatttgcggactatcagctccgcagtattgtgatccaacgcagacaggggatcatccaaaagcaggacccgcgatgcgctatagacagctcttgccagagatactcgcgctttttgtccacctgataaaccaatgccattttcacccacaaacgataaatcgccatgtttgaattgagcaagatctggaagtaaggcgcaagcttctagcgttcgtttgtagcgctggtcatggtagggcgcggagaatagaatgttgtcacgaatactcatgctttgtagccacggtgtctgggcgcaatatccaaccatttcgtttggaatatgcgctgaaccggaaagtctatcgagttctcctagaagagcttgcagaaatgcggtttttccagcaccgaccttgccagtgacaacagttagtcctttggggatggtgacattgatatcaacaaggacgggtgagacctttcctggccacgcaaacgaacaagaatgcattgagagtagagtatcgttcgccggggtttcagaaggcagattctccttgtctggttcggacatgaagtcctcgatacgcccaagggcaatgaaggcattgataaatgatgtgataagactaggaatatcccgaagacgagtctctagcatggtaaataattgtaatgcaggaaagataatatcaatccgcagctcatgcccggccaacaaggtatacgcgtacaacgcaaccactggaaacacgccactggcgaaagcgttgataaagcgaatcaggatactccacagactagtcacaatccgaatattcaactcatgctgtcgggcctccattacttgttgaagccagtgattctgccacccgtaccatcgcagatgacggattgcttccacaaattgcgaagttatttggagtcttgtatccgttgccactcgtctgactcgctcccaacgtagaagagctctagttactagggcattcatgatctgtgcaaccaggacggctaatattcctagaaaacaagacggaccaaagagtgtccagacaaggaaggtagcgatcacaagtcccagtggcttgtcaatcaacgaatcaacctcccagaatctctgtgcaacttcataaacatctccgcgcaagaggttaaagattttgccgagtgatgctgcttctttggcttgtttctgtggcattttttggttgcgagaagtgatacgttgccagaaacccacggttttggtagggggttgatcgttctcttgagctccggcctcaccattgacgccatcttcctcgtcggatggtactggatcgccctcaatcattagtccagaaatgttctttcgagaaagggctttttcgtaaaccatcatgatcatttcaccccttgaccgttcatagcatcgtctcccgtaccacagaagtaacacctgagactgtgcagcgacaagtcgaagagcgaaggacatgaaagcataggtcaaaggtacgcgttttggtcgggacgggtctttcatggcctgcaatagtttctgcaataaaacgggagtagaaaagtctgtgaaaattgttagcgatataagataaaagaagacatctaaattcataccacatatcatctggacaagcgatatggttgagatgattaaaacatcaattccattggctctcaacagccggctgaggacagaaccacgaagtcgacgaaacttttcatgcaggcgggcatgttgaaagtcaaatccaagcaaccaaacgtctcgttcatgaagttgtcttttgcgcccagttgagatcagcggtgccatccaagacactgtgaggaactgccagagcctcagattatcttctggggtgcgaaagttatttgatggctgttgaccaacagcactaatatctatcgatggcaaagactgttcgcggaatggcattaggaggattgttgcacaggctgccgccgctgcccctgcggcaatgtagcgagcaaccatcttgaatttcgggcatacatctgggtgagtagccaaagaaagttcaattgtaaatgctagaaaataatacgaaagcatcaagatggaacatgatctgggccgcttgactgcgaccagaatagatgctgtggcctaaagagggatatcagtaattgatactcccagagacgggaagaaccgacccatgagagaacaagcgcaaaggccgaggcgtcaattgtcggaggaacaaattgaactgtctcggctagaagcccagtagccgaaaatagaaggagagagatagtccatcgcaatgattgcttgggctgatctagcgggagatcttgagtatcatgttgctcagacacaaaaggaacagtccacttggggcgccatcgctggcaggagtattcaagtatatggcttaatgcaataagcaacactattatggccgggatgcatgctaggtatggcaatgcacaaggtgataaccacgcattgtgcgagtcctggattggtcagacggtgcgagcgggaacaggggcccgcgagtacatacccagaattggtcacactgggatctggatgcaccttccagcggaatttgattcatgcttggtcccaagtgcagtggcaactcttcgcggtagccttggggacctcacgaagcaacgtggggccggatcaatattcatccgctggcccgtgtcatctatacaggcgggtcagagtttggaatttagttctcgcctagaacattatatagagagtttataaaccgtgtacttgtttcaatggtgttgcaattagagctgttgccttgcagggaaatatgccgagtctatcgggcggtcttacggcttcaatgggcggactggcggagtcatccgccgcggggcgggccccccccccacagcgatctggatgcaccttccagcggaatttgattcatgcttggtcccaagtgcagtggcaactcttcgcggtagccttggggacctcacgaagcaacgtggggccggatcaatattcatccgctggcccgtgtcatctatacaggcgggtcagagtttggaatttagttctcgcctagaacattatatagagagtttataaaccgtgtacttgtttcaatggtgttgcaattagagctgttgccttgcagggaaatatgccgagtctatcgggcggtcttacggcttcaatgggcggactggcggagtcatccgccgcggggcgggccgcccattcacagtccggatgaacctcgtcacaggcaaactacatttttaataaagcctactaaggctactaagttagaacagtaatggctggagtatctccccaatacctggcgcatggtactgatttatgcttgaagcaaggcaggctgcttatcctgacaacagaagaatgcgatattaaagcggctacatagcccgcctgagaactcgtgttttactatgtaataacacaatgatcccatgaatctcctgcatcaaagagccttccacggcaaatcgctcgatggtttctatcgtgttcttctgcaaagtatcaatatccggtaccaagtgggccaaagctggacaaacagagcctagggtcaggagaagaatagaagaaaacatccttaaagaatcaaacattagttgagtccaagtataaagcatctcgtagacatacgtatgaataatgatttctgcgcaaaatgacgggcccaccagtctccgcgttgaggcatccagatacgttcgacaattggctatgctggactcgcactgtttgagtaccatagggggaacatcattctcgggtgatgagtcaattgcacaaagaagaaatggtctagttatgatatccttggcggagtggaagcggtggagcatattgagttgaaggccagtacatcgtgacggatcgttcatatctggtttaattgttcgcggtaataagtcaaaccaattgtcgagctgccgggcaagctcttgggagacattcaggatcgcagagagcgattggaagtcataagagggactgtcgcttgagactggctgtagaccgaggctgcgccttgtccagtcacttccgtacatagtgtggtgtactctatttagtaggcgacgaatggatagttcggcgaggaagacgtgtgtttctttggcgtcgttatttgcaaaggttggaaaaggtgtcagatcaattacatgttcgataccgcttcgtggtaaatggtgttcagctatcagatcactggtatcaatatcagcatcaacgtgatttacccggatgggaccaagaaaccaaccactcggtgtcgaacgctgcccacgatagcagaataatgctggatttgaggtcatgattatctgccgaagcttggcttctatcccaaacagatgcttgatcaatagctgaaatcaaacggaaggacaaagagcttaacgaaccggctatttaaatactggatactggtggaagccatgtggaccagtttccatgattgcagagggcgtaaaagaaacccaaaatatttcgaaatgagtatcaaactctggggaagagtgattgtgggacaaaatgaaagtaaatattcattcatcaatatctgcaacgcaggtgaaatgaagtctgccccaggcacccagtatggagacttggactttatcgggtcaacctgctcgagagctgcagagcctaatgcaagaactgcaaggcatagtgcagagtcacagtcaacgctcagaccggccctaatatggtgatcgtaaagccccaagaattggtctttgtcaaggattggcatctcaacatggacgtgtttgaaatacgcctccactagtggataagtgctcgcttcattgaggattggcaactgactcgctgtaattgtacctggaacaaaagatagctggtgtggcatatgcctttttgattctgcgcgtataaacaagtctgggggaaactctccgaagagcgcctttactctagtcatatgcagcatatattcggttgttgttgtatgaccgatgggaatactcatgggtggtatatcatgttcaggtggtatgaaagtagacgaattcgtacttataagctgggagatatccgccgggtttggtcttgacggggacgaaatcaacatggtagaaggatgagaaaagtccgctctttcattctcagatgacggcgggagtgtgaaatcaccactccttgtttcaccagtctggggtgtttgagggagtctcggatgactccataagaagttctcaattgcatcgagacggcgaaagaactccgaagaggaagtttcccctcgaggcctgtcggggttcagtaacgatggcgaaacttgaaaaaaaaacaaacgggtgtctcacctcgcagtatcagcttcattataaacacaatcaatacctgaatcctcacagaggctacaggagggtatcgcaccattgcagcggcgtttcctgcttgtctgtcagcatgaggaaacttggtcataggagttaggggaacctaccgcctgcgacaatagttgcatgccaaagaagcacgcttacgaccagtttccatgtggtaaattatatgggcttcaaggcttaaagccacctagatgaaccgtgttggcgttgatgtcgatacaagacgggaaagtccgccgggaacccgcttccacccgtgaacagattttgttccgccttagtcatcgacacttccgcccgctcgcccagccctggggaaagcttacgatagaggaaagataactttaatcttatttaatacttaacagctcatcaacccttccaatattgtttttcgctctcttctcttttatttactgggaaaaatctctcttcgacctggacatctccatctccatattcctttgcagtacggagaacggaggacacaacgccccttgccaagaacaccgacccacaccaaggccgtttaccagtcttctttggcttggttccttaggtatatactattgtacaattaggctgactcctattcaagatctttgttttcaaggtcattactcgttaaattcaaattatctgaagccgtagacatggccacgtttaaaaatgagattcaaagttgtttcgggccgaccttcgggaaactctcggctccacctgagttccccggctttcagagattttttagggcttgatcgagatcgggaatacccgattcttttcagtctttgaaacatattgagagctattaaagttagaggtctaaagtctcgactaagtcgcgtggaaggaacaccatgtcggacgaaaagtatgttgcggacagcaagatcgagagaccactcgaaaaagacgtggagaaaaaattggacgcgacgcaattggagccctttggaaatgaggacacagcggaggtcaagtatcggactatgaaatggtggtgagttgttaattcctgcataaagattgtgaattcgaccatggacatggctaatcaagcttgaaaaggcactgtggaatgcgtgagtagctaaatttgagatcaaaagcttggctcctaacatctattgcagtcatgatcgcagagaatgtttctgtcggaattctgtctttgccatccgcagtggctacccttggaatggttccgtatgtattctcttcgacagcttcgagatcccataactaacaatgtcaaacagcgctgctattatgattttgttcgtctctgctctttcatggtatactggctacgtcattggccaattcaaacttcgccatcctgcagttcacagcatgggagatgccggcgagatcttgatgggtcctttcggccgtgagttgctaggacttggccagctgctgctgttgatcttcctcatggcgagcaacattttgatgttcaacattctgatgaatgtattgaccgatcacggtacctgcacgttggtgtttggtgtcgttggactggtcatctgctttttgggtgccttgcctcgtaccatggacaaggtctactggatgtccgtcatttgtgagtgcagtcatgacacttttcaactcagatgagaactcaactaatgtgtatgaagcattcttgagtgtcttcgttgcgacagtgttgaccatgatcaccgtgggagtcgagagcaaaggacatgtcaagaacgaagcgacaacggatgtcagcttccgcgaaggctttttggcggtgacaaacatcatcttcgcttaccgtaagttaaacagtgaatcgccaaatgatgacggtgaccagcacttgaaataaaccgagctaatccagagaccgatcttatagtcgcccacgttgcgtactttggcttcatgtctgaaacagaagacccacgtacattcaacaagtcactcgccatgcttcaaatcatcgacaccaccctgtaccttgttagtgcactgctcatctatcattacgtgggaccggagacagccaccagcgtcggcgtgcaatcgcctgccattctctctctaagcccgttgatgggcaagattgcctggggtctttcaattccaacggtgagtttattcttttggttcgtcttctgtatcccacttactgattcaatacagacaattctttccggagttgtcttgggtcacgtcgcgtgcaaatacatctatgtgcgtatgttccgtgggtcagacaagatgcacggccgaaccttcctatcgattgggtcctgggtcggtatctgtctcgcagtctgggttgttgcctgggtcgtggcagaatctattcccgtgttcaatgatctgctgagtctgatagtaagtttatcgaatctcactcgaccgggaacgtttgctgatgtggagattacagagtgcggtctttggaagttggtttagctgtaagattgacccacctttccatcattgaatttcaagatctgaacaagtgctcacgtatcattagtcggactcccggcgatcttttggttctatatgaataagggccgttacttccagaactggaagaagactgttttgacgattaccaatattttggtcttggctattgcctttgctattgtaggtatgcccctacttatatccagttatggtggctaatcctttccagtgcgggttgggactatgggtgtcaggagtcgccattcacgaagactccagttccagaagttggtcttgtgccaataatgcgtgattgaagagttgaagtttgacgtattcgaatactaacaaagccagactatgccgagtctgcacatggcatgtcggttaatctgcaactggttggccacggactcgaagaaaaaccgttggcgatggcggattgtcatctgaaatccatcgccccgtgactaggacgaaccaacacgaattcagacattatgactccaatatcaacagacgtgatttgagatggaatatgcagcatcacggccttggcggtagaaagcaattgtgcgtagagtggccgttgcaccaggacgagcgcgcgactggatgaggcaagctctttctaaccaaaatctaacgaggccggagactcgcacaatcgtagtcgaattcatggtcaaacctgtttctgtcaatttttggcagccgatcgaacaggctcaggggaggaaggggatgttgtaattaagaggaattatttccgagcggcctccttatctcatgagaaagaacctcaaatataccaatgtacttggcaatctcaataccctcagacagcgtactttagtggatgtcggcaaaggaaaatccccgactcccccgctttggcggaagtgtcccgcctcccatccgcctttccccacctgacattatcgtatcggtgtgttacttccccgccagcgtcagaattattattctcacagagctcgctacttcaaacttgctgctggtagtgatcgtcaagggcggtgtattcacgctccacatactttccactccttcttacatcctctgcgcccagtgtgaactgtctgtcttggaatttagccttacagaatcaatatgcctaccaacacctcagcaggagcgagtgaggaccagcgtgcctctctgatttcccgagtccttcctagaatgactatgtcggagggatcaagtccgctcactcgccccctcgctccagtgccctttacagatggtcgctcacgagcagaagcacgatttcaagttcagggcaaagccatagtcaccggcggagcaggaggactaggcttagtctctgcacaggctctcctggaacatggactctcctcactatgtatcatggacctccccagtaccttggagacgtcatcagaacaaattcaatcactagcatcaaagttcccctctgccaatataaccaaaattcccctggacgtgacatcaatggagtcaatcgaagccgcatttgaacaagcaaacaagacaatggaaggtatcgacatcctctgctgcttcgctgggatccccggctgccaaccatccctctcagtaacacccgaccaattcaacagagttatagacgtcaacctaactggatcctttttctgcgcccaggcagcagcaaagcgcatggaatcctcaggcaaaggcgggtgtgttttattcactgcgtcgatatctgcccatcttaccaatttcccgcagccgcaggcggcttacaatgcgagcaaggctggggtcgcgcatatgactcgcagtctggctgctgagtgggctgttcatgggatcagagtaaatagtattagtcccgggtatatggatactattctcaatgctggggacagtttggcggatgttaggaagatttgggattctcgttgtccgatgggccggatgggagatcctgaagagattactggggctgtagttcttctgtgtagttatcgtgcaggacggtacatcactggtgctgatattgctgttgatggggggactttggctctgtgacaatatggtagatgctagctacttttcccctcctgtcattggttccgcttgtcttatctcagtctgcatcgcgggtgtccttctcaagctttgtctgcttacttctaattctcaaatcagtttcaaaaaagtagtgtttcttcaagaattgttcattgtatctttttaaatacaggaaagaccgcacagcagctttttccactcctctttaccggcagatgtaacctccatcaatgcgcagatcggcaccagtagtgtaagtactagcatcactggcaaagtacacatacgccgccttcaactccttaggatcactctggcgacccataggaatcatcttattccaaccctcctgaatatcagcaggcacaaagtctcccaaaccggtattaatgtatccaggcgagatactgttgacacgagcaaaatccctccactcattcgccagcgagcgagccatgtgaatacacccagccttagcgacattgtacgaagtctgctcctgagggtaattgacaatgtggccggacatcgaagcggtgatcacaaagcttcccttgccgcgctccttgaaatgggggccaacagccttcgcacagtaaaagaccgagttgagatcggcctggatgacatcgtcccagtcctgaaccgagccctcgagaacacctttatcggcagtacggcccgcgttcgcgataaaggagtcgatcctgccaaagtcggtgatcacgtttttgaccagctcttgcacttcgtcccatttgcctgtgtcgcatttgtaggccttggctttgactccgaactcctcttgcagggctttggcgtttgcttcggcgccctcggggcgcgataagtatgtgatggcgatgttgccgcccatttcggcacagccccgggcggcttcgtagccgattcctcgggggccggaggcgccggtcacgaccacgaccttgtctttaagactgaagaggtctttgagagagctggcttgagggacttcgataggcatggtgggcgagaaaagggaggagttgaataggtgtatagaaggaaagatgaaattattttgaggattgttggtttgtgtggaggattaaggggtcatagaagggatctatggggtctttataccttttcatcgttgatggggactcgggtccaaccttcccaccgtacaactgtgcaacttgttttgctctcacttgagatgttgtccttctccacccggcgggacactcggcggcacaatcccgccagcatttctgtgggcactttggaggggcggatctctcaaattatttctcattttggtagataagataaatttagaaaatagcaaacgcattaggcgggctagcgacacccccgatgacctagaccgagtctgaatcagcacaatccccgcacagtcaataagcgggaaaccaaccttcaaaggcatactggacaagaaaaagctatagcgtccactagccttgcaatgttccgataacttctccaaatcaaacatctccccaataggagttccccagcccgccagcacccactcatgtaaattgaaattcgggtccgcatgggcacctctaataggcgcacgctcaaaactcggcgcatcaccagcgacagcagagaattgatgcgcccataaccatcgtaccatacactctgtcgcctcgacaccgctaaaatcgggcgatgatcggagggctaggtccttgcgctgctggtcgtccagcttgttgtatgcagccgtgaagccactgcggataaagagaatgtcacccttttgaaagttgaggttgtgatctttgactactcgtttcaggttttcgacggtaatggtctcggatttgagggcggaggtggggattgagtttgtggtggcccattctgcgtagtcgaggaggacgccgcgacctgttattccaccgtgttcacatatggctgaggggttgagattagtacggggttaatcatgtaccttgaggtgatgcatacagtgaattccaatgatgtccgagctttctatctcttccgtggtatgtccgttataaaactgcctggatttctggtttgctagattcgccaaccaataagcaatgatctcagacgccatagacgctcaataacgcaccgtaatgtctaaatccatcccattgggtagacccctggctattgaatgccaaggtgtcatcatgaatacaatttggactccgaagaataagctcgtgcttaaatggattgcgattgaagcttggatacgaaggcatgctcaacggccagtcaagagagattcgcacgccagttttgatttccttggcggcttcgacaacccgctcgggggtgagcaggttcaatgtcccaagttggtcatcttgtccaaatcgaccccaggcattccctcgtgggcctgttgggtctagtggaagggagtcaaacgagatcattgcgtcttcagttgctttcgtcatgatgaacggccccgtgagaggaaaaagaggctgaaggtgtatatatgctgttgttatacgaacgggtatagctttagctcttaaatggaagaggcgaacattaaatacggcgtataatagctcaatgtcaagacaaaattgcgtactcggatatgaatccgcgtgtgggggaagcttatagacctcgggatgagcggggtctacggggtcaccccggaatggacagctcgggagctcggggaaataaaccccgcgagtgcaaatcatacaataccgtttttttaacaactagttacaatcaatactgcaaattcactcggaagtattaagaaacttgaggcttcgttgatttctcgttcccgtgacaacaattgctaaatcagcacatgagagccaatctagtactggatactacatctttcgaatcgacgatactatattcgttggggtcatcaccttcccttcccgtgatgaagacaaacaaacgtatatgttgggtgtttgcatcactatgctgataaataagatcagcgctgtcaccctcccctgcggaatacccatctaccaactacccgatgatgatgagcgacgatgaagacgtcatttgaaatgccgttctatgcgactgaattgccctgcccgctacctactggtactgaaatcgagaatgccccggacttatccatgcgacatggagggcgaagaatagtcggagtaggccagcattttgttgtgaaatttggactaggtgtcgatcttattgaaggagaaagtatgttatttgttcggtataatacaaacatccctatcccgcgagtcttcgccctatattcggatctagagataggcaaaaacttcattgttatggagtgtgttctcggtcaaatacttctttcagtatggccgcaacttataacatcggaaaaataggaaatactgaaagacctgtagggatactttgacaacttgtgccagcttctatccctagaatactttggtagtcttaaccaaagacagcttctagatgatatattttggacacaggagccagatctattagtgaatggtccttttaactctgaaggcgatctcaacgaagcaatactacgaaagtatacctacaacggaggcccgtactatagggcagaatatcttcagaaatgctttccttttgtttttaagggcaataaggcgacatttacccatagtgatttataaagaaagaacattatactatacaagaaacctcatcgagaccaagaaggggggcgcgttgtgataattaattaggaaaatccggatggtatccagggtattgggaatattgcctagctgtctgtgctttacgatgggatgacgactggtccctttggatcgacggtatcctatcaccgtgtgtctccgaggctgcatactttcagtcactacgcctagaattatggtcatagggatattcaaagtcatttcgtccaactagagaggatgtgatcgaaattttgactagattcttacattaggcataataatctaggagtggttaaactatagaatttgagtattgtgctagtatcaaaatggtaataagttcttttgtcaagagagagaaaatatagatgctggaaaagaggggctggtgaaccccttcatgcaggatatataaggggcgcatacgatcccactgctaccttgtcaccctatcgcacaaggagccgcagaaaggtatatatgttgcgattgcctttcttggattaccctgagtctcgttatatccgaccttctcctattctcaccccgtttgcatcctctatctccaaccccaatcgcgcacagcccttctcggggcgtgcaatagaccaggaaacggtacttggtgagaccatttggaaatcatgtaatacgcattgcataaatatggacttaggggttaatcctcatgcgtatacaagtggtcgatggcttcggaacgataagcatcaacgccagatacgccatcttgatattaattttgacgaactctgccgtatcatggaacatgcggcaggagttcagttacaacagaagtggccctatatgccaggcgactagaaggttcgatttgtagatgccatctacagaaagcttaaagagatggccgacattgactttccagcctatggaagcttatatctttccaccccttcattgggctctttctctgggctactactaaatggcggctttcgcctcggaccccactgtggaacaagatattgggattgtggcgagcgcagatacgaccagcatacacttcccaatcaaggcccttgtgagtctctcctagcccattcttcagaagatgatggctaaaatttgagggtaagggttgacattgactgcatactctgatggcctagtggatgcaggtctttcaagggttccaccgaatgactcctagatctcaaatcgaccattctatcacggctcagttcagtcacatttagaccctctcgaacgtggtcgtacagtgctccattcgatgtctgcagatacccaactacatgatgcagctgcgccaatcctctttcaccccgacctacataagaggaacatatttgtttcggatgatgatccctcgattataactggcattattgattggcagtcatccagcatagagccagccttctggtatgcggatgagattccagacttcgcaagttgttcgccttcctccgaattgccttctgggaatctaaacaacagcgagctatgcagagacaccttcgaagtctgtactcaattcctcaccccaaagctcgtcctccctaggatgatggatgaaggcatgttccgaccgcttaggtactgctacagaacgtggaaagattgcgctgttgctttcaggcaggagctcattgaaacttctagggactgggaggcgctaggactcgttggctcgtgtccatttgtctcaccgagaccggaagaactggctgttcatcgaaaagaatacagatgctttgaggcggcccagaacctaaaacgtgatttgtcaaacttgcctgattgtgcatctgatggatgggttcctccagagatttgggaagaggcaaaattacaaaacaaggcaatgttcgatgggatgttgcaagctgttctgacaaatgaagatcctaatgaggatgaaccaattagggatgaaagggacctgagagatatctggccctttgatttgccggacgagtagttggtctcatctctcattaagttccataagcttagggtactctttgaagacatgcattatgcgccccctacggagattcaagctaaagaatttcttgaaatcagagctgtgtatcattaaagctcaaacgccttgagagtcaacgatcttggcaactagtccaatttacaccactgaaactgcatatgtactggatgatcttcggcattcacgacctttccccttccataactaaataccctagaaggtgaagtacgcaatagtagcagcgaacgtagccagattgtcgccaaccgtcgccaacgcagtaccatccttcacaatcatatagcttgtcccaacagtgttcaacccatataccaccagtccacttgtactgccctcaacgctgaagatcatactttggcaatcctctggaagggggaaggtggagcaagtggtgctgtagttgttgaaaaagctgtatagcccagccccgtagataatcacatccttggtattgagaatccgaagaccaagagagtcgcagtttccgccgagacagctgctatagtcagggtcattgagagccgagttggtagggtacgggccgttggctgcattgggatttggttgatagtatctgcatgcaattggttaggacaggagatgcaagggcagcagcacgtgttggatcacttacggagtttctgtttgtatgaaccctgccacaatcgaactcgcgcctgagaactgatactgatacagcgagtgatgctcggacgccgttccgtatcttgcgccgatgttagttatgagaaagcattgtgaggattatctgtcacttacaaccagacattatttccttctaccaagagaccgcgaccggtatagaccgagatttgagtattagtagcgctctcaaggtcatggtcggcggtccatagccagacattctccaagtaaacaccactggcgactttggtaatgtgcatggacatgtaaccaacctcacagcctgccgagacagctgcagtcgtcgggcactgagcaacctgctgctgagatccttggaagcccccgattcgagtgtgaacatcccacatcccagcgcctgatgtcgctgccaagttccactcaatgagtacagcgcccggcgtggagcccgcggtgctcactatcatatcagaccattcaacgaacccagattctccagatttgccaatttgaaccaccggaacgggattggtaatgctcgaccatacactgccagttgccatgatgacaggatatgcctctccgacaatccgagagcccggtgggacgtaaatagtgccggtgactttgtacgttccttgatcaaagaacacaatcttacctgcagatgcggcagatgtcagcgcagactgaatggctgtcgtgtcatcggttgaaccatctcccctggcgcctgcacttctaatgctgacaaacgaagcaactggtgattgctcatactgaggctttgacttggtaaaatatctgttcgatccaccagcaagcaaagcgctaggacgtgtcggtgcagtgaaagagccctggaagttggtcggtccgtttggagtatatttgtggccttgtccccaagcagcaatggtcgtagaggcccccgagccagcaagaacagtaccactgacgcctttgactgcaacggggacgttgttcagaattatgttctccagaatgagacttccagttgatagtgtggaagtctgccaagcggtatcgacaaaggtagggcagttttggatggtgctgtcaaggatattgaccgagccaacgagttgggccccagcaccaccattgctgatcgaaatagcagttgtgcagttagtcaaagacagaccttgataagtccacccccagttccagatctgagaaattgcggtcactgaatttgaaatggccaggttccgcattgtgaattgctggttgccaatattggcaccatagaggccaccagtaattaccacatcggtcaaccagccaccagagcctggtattggattagtatagacctaaaaaaaataaagtagcaacataccattctcaatgaaaataccctggtgctgtgttccagaagcagaactcatagcaatgacaacgttctcgatgctggaagcttggccagtcggccaatgaataccagtcgcagcagtaccggcagggattgaggtcaagtccaatttcaaattgcgaacctgtctgaagaacacattcgtcgacgtccagccctggtttccatcgctctggtattgatcaccgtcaatcagccccagtccgacaaaacctgcggttgcttttataacaggcattgcattcgggttgccaatcagctgggtgaaatagtaatcaataatcgacgatgagatcaggtacgttcccgatgggaagtagactatcgcaggagtcgtggtcgaggattgtctgcttgccgggccaaaccggccaccggcgcttatggccgcattgatcgcggccgtatcgtcggtcacaccatcacctatgctcactttagtacgtctcaggtagtagcgatccttcaatgcacacctatagctccgtagtctttcacgtttcggaagacttggtagccagaagggttcgagttgaaggctgcgactccttggtgggcgatgtctgctagccagtacgcagcgtctgctgctgccacggctgcaacaggagagttgaccacggcgaccttggtctcgaagcttacagcagccgaggcagtctttgttgaagcaccgaaggaagtatactgctcaaaagggagcatggcagagctgactatagcatccacagcggggatctctagtagctgtgcattggcacaagccaccaaagagaaatacttgatcacaaaagaataatacatcttgaccctgaatcattaaagaggtaagttggcgaggcaggtgctttcgattcacgggctatggaagcatgggcaacagaagccggggacaacgtggtttatgtatgtatagcgacctggacgatgctgacagtagacacaatcggataatgcaggcatgcgcatgacagaaaaggggtagagtcaatgaccctgtatcttcagccgaaagaaaagcaaattaaggaatcccaccccgaaataccactcaagacggggaaatatatagcgagtgactgcagaccaaggatatccattggctatttatttccgaggaggtcaattttcccgtcatgccctgttctctgtttcatgtcctggaggtgtcctagtggaaatgagaatgtgaataaatggcgcagatcttttccccacaagagatgaagtaccctgcctctacctgcatgtcagccaatagccaatcgatgtctacacagcatagagcccgagctaaactgtgagtttggcgtgggtgtttcctgataggaatggaatgtgactagttgagaattccacccttcgcagtatgtgatatgtgatatgtgacttatgggtgtgtgtgaccggttggtcagagagtctaatcattcagggatttatgctcataacctttcttgggattcaaagtgtcctaactttgactaacttaaatgaaattaaggtcagcagacccatggaacgccatgctttaagtgcggggagacgagaccgaaggctcaggtacttccgtcttataggtcacactcaccttcgtttcccttgactcgaacattgtgatactcaagtggcagacttagctaggtcgggttttccggtcacccgcaaggcgtccagcccactcagtgattcttagcctcttgtgttctcagagtgtacacatgcatcacgcagagtccctttgtatacttgctcggcggtgcggaacatcaggaggtacttgaacccactagctagaattgttatatgcatagatttagactctgcttgatataaaagaatccatcatgctcttttcgagctccagtgtgccttgtaatattggtggaacggatctttcttccgctggtcaacgtcggcgacatcatgaagtgagcgtggcttcgatttgagtataaagatatccccctgtgctgtcaattcatttgctagaaaatgggccgatctcattcgagaaaatcatgacaatcgtattacatcccctttgtccaatgcaggcagacaatagtttgtaaagtcgaaccttgctgccaagaaataccacgtgactcgttcttgtccgccttggatgcttcctgcaaaaaaaaaaatattatagtcgtgcctcctccattattgtgttgttggacatctcaagattcgaagacaaatatcatcactgacagcaataaaccatcgacctgtcttcgaccttactttcgccaactcgagagctccttcgtcctgctgacagcttcctgcgcgacagatcgcgaacgtgtcacggaaccgcgaataccaccggacaaccacatcgaagacgctagagacaaatgggtttcgctctctccgcgattgacaatatctaagtggaggataacaatcatcaaagctgttactctttcgagtcggtgtggagttggaaagagcctcgccgtacacggaaagctccctacttcgattgccgccagtgagggaactcatcaggcgccataccgaggtccactcttgcatcaagcttgattcacgtctttaaccctggtcacctagattccgaaggttacgatacgaggcggttcgagcttacaatcatacaaccaacagtggtcttcatacactcaatatgttgaaacgtggagctcaaggccctcaggggtccaaggaagacgagggtgctttcggaatggccagcaccccggatgacaagccccaccgagccacagcggcccagttagccagtagaaagtaagtaataactcaggtagcgtttggatgaccacaaactgaccgaagatctctttgcaactttcaggatcaagaatgttcgctcacgccgggctcctactcccacaaccggtggaggcgcatccgatgcggcttcgttcaaccctttcgcatccgcggccccggcaccagcgcctacccagactgggttcacattcggccagactcagagccagagcttccctgggacaaactcgggccccggccagggtggaatcttctcatcaggcactaacggccagaccggtggtcaggcgtctttcaacttcggctcgggcccaacctcatttggatctgcaccgtcgagcaatcctttttctgttgacacatcatttggcggaactacccagtcaagtaccaatggattcagttttgggggattcaacgccggaaaccaggccactccgtcgttcggtgggttcggagcgcagcagaacacaagcactccagcaaagcccgtcctatttgggcagtctacaacacatatgacttcgcctgccgatgagaacatgcaaacttcgcctgataacaagcccaagggggcttccatcttttcacataagccagctgcacctgagaaacctgccgacaaacctgcggagacccagcctttcaaaccgcttttcggatcaacacccgccgcttcgaagcctttcggtacagagaaaccgcagcaaacattcaacaatccatttgcgaaccttccagggcagaatgcgtccagcaatttatttgcaccaaagacagctacatctgagaaacctgccgagaagcctgcggagacccagcctttcaagccgcttttcggatcaacgcccgccgcttcgaagcctttcggtgcagagaaaccgcagcaaacattcaacaatccatttgcgaacattccagggcaggctccaaccagcagtactaacctgtttgccccgaaaataacggcagctgagcaaactcctgccaaacctgctgaggcggcaatgccctttggtactcttttcgggtccacctccagctcccaaccctcggggcctgctagcaatctatttgcgcccaagccagcggcagaagaaccaaaggcgagcaatccatttgcgagcattccagtgccgagttcatcaggcaatttgtcctcaccgaaggttactgagaaaactaccgaagcacaaccgttcaagcctctgttcggtacacctacgacatcgaaagctgtggagactggaacgcctgcaccagcatttggcaatttgttctccccaaagccggtcgctgaaaacgcggctgcaaagcctgcagcagatcagccgttcaagtccatgtttggtacacctgcggtgtcgaaagcctcggaagccgggaaagaacagactgcttcacccgcatttggtaatatgttctcaccaaagccggttgttgatagtacggctggaaatctatccgagggcaagccgttcaattccatgtttggaacgcctacaaaggctgaaaaagaacaatcagcggcaagcagcgtttttacaccgaaggtgacaagtgaagcgcagactcctatacctgcgaagacctcacaattcggctcaattttcggggcgtctcctgcgtcgaagcttggaaaagaaaagacagcccaggcaacacctagcaacccattcgcgaaccttccagggcagaacgcattcagcaatccattctcgccaaagccggcagagcaggctgcaaaggcccaagcaccgagtacatctctctttggtgcaagtacggcaattgacaacaataagcagaataaggacattgagggtaataaagacaataaggtcgcagctctgaatagcccattgaccaactcattcaccccggggcctaaggtgtcgaacggaccccaaacggaaggtgcgacgactgccacccctcgtgtgtcgttcgcgcacttttcacatgacaacaaaaattcgtcgtctttacctgttccttcttcttccacctcttctctgccctcctccacaacttctactgttcccaacacgttcactgcttcagaccctgacagtcttttcccaccaactgatcatcctgtatctttggactatcctgagtcaactgaagacttcgacagtatgccactcaaacgtcttttcccagaaaagaatcgggacgaactccgcacgcgagcttctttgctcaggaatatcggtgtcttgaccgagtcgttcaagcgtgagatcgtcaaatgtgaccccacaaaagagaatatcgacgatatcctcattctttacgctgaacttcgccgtgagctaggcgtccccattggatcaatcaaacccggggaaccggccaaacgtgccaccattcaccaacgcgccacatggaacgaaggtgccgccgccaaagatgctgccgtcaaagatgcgccaaatggatacgcacctcctcggaacccgacccctcccacctttgtacctcctgctcttgatggcacgccctcatcttcttccaccaagccttctggtgggtctactacttcctccaagttcgcccaatcgttctccgctccaacccctgctccagcaaatacttctgtttccacctccaatgctggtccttcgtcctcagccgcggctcctgtctcggttgctcctgtcactttggctgagccctctcctccgactaccgcccccaatgctactcctgtagccactcctaccgtcgagactcccaagcttggtgatgcagccacttcgactgccacccctgctttccaaattcccaagtttggcgatgcagccacttcgaacgccactcctgctttccaaattcccaagtttggcgatgcagccacttcgaacgccactcttgctttcaaaattcccaagttcggtagtggagctactggcactgattttgcggcgcagttcaaatcagtgtcggacaagaccctagccgaagcgaaggccaagagaaaggccgaagagtttgactccgatgaggaggatgaagctgaatgggagcgtaaagatgaggaacgtcaacgcgagaagcgcgctcaactcgaagctgcagctaataagcgttccgtttatgtccccggcgtgggtttcaagttcgctgatgataacactgctccacaggacgttgaggagcctgctacatctgccaccccatcaacccctccctctctgttccctccttttactgctccttcaaccgcttctactaccaatggtaccccctcttcctcacaataccagccccggttccctagatcatctcctcaatcctccgaattctcaactctcgtcgggacagccactcgttcgcctgcggatgctgcactctttgggaccaagcctggacctccgcctccttccttgagtgcaggccctccaagctcctccgtcggctcttcgatattcagcggatcggtcagaaagccggttccagcctcgcagaacattttcggcaagttgaagccgacctcgccgaaacgcaaggcgtctgcggatgaaagcgacaacgacgatgattcccccccaaagaagactaagtcttcccacaacattttcggcggaccccagccgacctcgcagaacattttcggtgggctgaagccgacctccccaaaacgcaaggcatctgtagatgaaagtgacaaccaggataattctctcgccaaaaagacaaagccgtcgcctccccctccttctgcgggcgccagtatgtttggacgggcgtccactgccccatcgccggccccttcaaccaatgtctcttcacagcccgcgatggccactccctcggccacttcctcggctcctcccactcaatcgatttccaccgctactgaagatgaggacggtgaacctggtgaaatcttcgatctgacaaagggcaacagcggcgaggaggaggaaaccgtcatgttcgaagagaccacccgtattttcaaacttacgggcacctggcagcccaaaggaaccggtccccttcgcgttctgaagcaccctgtcactggacgtgcacgcatcgtcgcccgtgccgatccaagtggaaatgttatcttgaacgctcccctgatgaaacagttcgactacaagagtaactctaacagggttcagttgctagagcccaaccagaccgggggattcacgcaatgtacagttcgaattccggctgaaagaatgcaagagttcctccaactggtcaacgagatcaagacctagatctctttttatctcttccccattttttcttcatctttgttctcccttccgggggtgtatgctaattcccaagcgcatggccatggtttgcatttgcgtgttctgcctttatggttcggtttctttttgatctcttgctttttgttgttgtttttctttgtgcatcgacccctccccttggacaaagttggcccggcttcacgccgtgggccagcttcaagcccaatagcatccgcctctttccttttgaacccagtcagggcccgggtgagtatctccctgggcgccacgggcttcaagtcggacagagtcggcgcggcttcacacagtcggtctctttttctttgagcctagttagggcccgggtgagtttctccctgggtgccacgggctccagaaaacgtcggcgcggcttcactggcaatgggccagcttccagtccaatggcatcggtctcctttgtgagctctgttagggcacgggtgagtatctccctggacaccacgagctccaagtcggatttcctttttttattgaagataatggggtctacattgtatttctgtgaaggtgaataaaaattgatctttttttctaagcatacctcgtaaatacatgtcagtaaatatacatcaattaactaaatgaagtcgatcataacaaagaccctgagaccctgagaccctgcggctgtgattttcgaggggccgagactcgggtggcggcctaaaaacccgcctatttaagacatcgctcttctttccagttctctccccgttccccttttattttcttctgcttctcagctgtcactcgttaaattttcacgctcgttcaaccgtccaaaaatgaaaaccttcgctctttctttcctcctaggcctcgccagcctcgctacggctcgcactgacctgcaaggctgcgtctcgtcggaagtcatagtcgagcaatactacgccagttacatctggtacgtccctggcaccggcgagatctgctcgttcctcgactgcggcggtggtcgtgcgccgccaaagaccaaccaaccgggatgtccactatacagcggaaccgcaacgcttactcccgactacctggcgggctggggacccaatggcaaacaggctgcctctacaagcaccgtggcgtcaacttcttcggcgacagccgcgtcgaccactgatgttgtgctcgcttctgccacgcagacttctgaggcgtcggtgtcggactcgtattccgcgtcttccgctttcgcttctttttcttcgtctgattcttcttctgattctggttcttcttcttcgtcttccccgtccagcactcaagctgctgatagcatgatcacggctgctccttcttctctcgccccggtcgcttcttcgttgaagatttccacctcgtcggcctcatctaccggtaacgctacctcttctgctgctgcggcgaccagctcgcccgctttcaatgctgccactatccccgcctctaatgttgccggtatcatggccgtgcttgccgctatggtcggagttatggtgctgtaatttcaacttgattttgtacttataccttgtggaagtcggatttgtacttagtttttggagagaggagacgggcttgatttagataaatactcagaaatatacccacttgcggaacaaccccctattccttgtccatagcatgtcacaccactgtcccacggcaggagaagagtttgagccgcatcgccgatctgcacgacccgccctcttggcgagactctctccacatttgaagtcggggagatggtccgtgggaatgactcgacctgtatattctagctgacccgggatagagcctgtctgtctcttgaggtcactggtattgcaaacatggcttgaagtaaggggtaattgagtttgagatgcagccatgtcgtgtttttgaaataaaaaatcactagatgtagtacgttaccaagatttctttacttctagcgatctttagttaggaagtggaaggagataattattacattgaggtatgtacaagcagatcgaaataaccgaatctcggggacggactccgttcggtccgctgcaggcccaatcaactatattgcccataaatcggtggcatctcaccaaaaggaaacagcatatcgaggggacaatctatcatgaagttgtagtccatcggggcggcatttgttggcagggaggtttgttccagtgcttcttttctccgccgatgcatccttttaatcgttaccgcgcgattggtcatccttccaaatatctccggcagttcagcagacttcggatcttgcgcaagagcctgttcgaagaatggaagttcttcttcgagcttgccagttatacgatcaacggtctggtcgaagtccattatgctttccacgtatgcgcggtcccatccgggatggtcatatagagatagctgggaaagagtgacgattgccttgccaaattgacacattatggtgaaggggaagaaagggaaaagagcagaggggagagagaggatgttttgcaaaaaagaggttgtcgcttccacgcagcggaaaagaagatccagttgtatgagaggatgatcaccgtagttaggtttgggttcgttaataagcgcaacccggtaaagatgtagctcgagcgtgttgtaatgaagctgtagaatggctgtcgttgttgtcagatcattgttagattgtgcgcgaaaacagcacaacttaccattgtgtggtgcctgactcggcatgcgagctttgagttgcttaagttcggcttcaagccatcgtatgcttagaccaagtggcgggggcgctgatgaacccgatgaagaatagaggtcggtgtaatatagtgtgtgatggatcttgtctgccagtttcatcgctcggactagctgtacgagagaagcatcggtgggatactctgcgacctggtctaggacattgcagcattcgtcggtgtatcttgtaaagcgaataatcggccccaggtcttttacacatgttgagagcctttgaagaattagcttatggccagcaagaccaagggtcatacacacatggtagtcagataataacacccaagataggttcgtcgctcttccaacgtccgaaccggagtatgagagtcatcatttatagattccttcaaataactcagagcatagttcaagttcttctggtaattcagttcttgatttaggcccaaactgaaggattgcgccacgagtaagtgcacgaatgtatcaagctgggcagtgcttcggatagcttggcgaatctcctcttccgatttgagcacatcggggggttggttcctaggtcgcgggaaacgactgactgaaacgaaccaagccacattgatgagaagcccctgaagaagatccaggctatgttctcctctcatgacgatgtgctcggccacatattctttgactgcatgcacaatttctcgctgacgtggcgcgttttggcacgcgaccattgagatattcagatagaggaatggtttctctcgacgcagttcctctgctgtgatatccgggggcatcatgaggaatggaaagagagggaacattctcttggagaatacttctatcaacagctggccttcaatttcatcgggagcagcagggttctcttcaaccgtagatgatgatctcgtttctgggccgctttctacccgttctctggtatttcgttccgaggcggccagcatggcgaccatacggtctaatttagcctcaagtgcggcaacatctctactagagtgtcagcggtttcgcctgataatggtggacacttagtgaacacttacgagccacttgcgacggatttcttctcacgacgatgggcgccgggtgcttgcttttggcattcttttctcaagcgacgacaacttagaaaagttaatatggatcaagtataaaatcaactatatgctcaccgtttacaaggaccttcggtttccgggaaacatcgtactttggccttggcacaggttatgcatgccttaggatgacgggctccaacttcatccatgacgtcttagcgtacactaacaaggccaacggtgagtcggatcgagttaacgagatacaggagcagtcagatgatgaacaagttaacaactcgagtccgatgtgtctgactgggaagaaatgaaggaacggaactccgcacttgatcgcatttttattggtcaagttgtatcatagtgggcctcagctactatataaccccctttttatatcagggctatgctatgccttgccataacttcatacggattgtcaaatacctccttctcattctgtatatattcatacgtagaaagtaagaggggttctctctgtatgcctaggacgatgcaatatagcacattcgacaagtatttgagcagtcgcctaggttgaacattgaacgccttgttgtgtacgtagagcgagacgatagctgcgtcattggtgagcgtatgttctcgggagtcagacgacttcgcctgtcgtgtggtcggtgatttcgtcgttctttagcggctccatcaccttccttccatgttgccctttgtgagtgttgcaatcatctccgtcaccgtcgcctgtgaccaaactttggaccagtcaaggtagtattttcttccttgcttctcagatcaataaatgcctaagcacctcaatacctatgcttctatctcatatactaggtagttctctggcttagaacctggttggtctcatcgctgcttctcattccccactatgtttcatatctctagatgcattgctcccagcgtaaagtatgccagattaggcgaaaaatccgtaatggtcgatcggaccctaggtagtctgagaagtctcgcagacgtccataagaacttagtggcatagccgcatagccccgattgacgatttgcttgcacttatggtatttcggtatgcaatacaagcgcgttacgtcctaactactaggaatatggtggtcattactagatgctaatttctgcttggcatcatcccaattaggcaggtagggcttagggtttcattgctttgctctaagcctgcttagtaacctataaatgcaggtctgtttcccgctaatcctaactaattctactccgtagctgaattgctgtccaagggcgcctggtgctgcttggtgttggggtagttaggtgatactccgtggagatgccccaaattgggggtccctagtgcctaggcgaagggacccatagaagtggtgcttcggagtcggaattgagatatcttagtatcagaagcattgtgagcaattagcggcatctaagcagagattaaggtcgagatcacgcatattcgggtataaaatggagaaactcagtatcggaatcatatatgaggttcaaaagctcattgacatatgaataccagttagtaaatattccgtagaggatctattaccccaaatagtggaccctgggatgcttcctgggagtaaatgcattactcaatagagtgacctgctgaacgtctctacttcggatcaaaaagaggcctaaaataccactggactccaataattgaagccggataagattaccagcctatctacacggaattagtaagaaccaagtcgaaattactccaacatctccaacatcgacctcacgtacaacaatttgagcgagtaatgttgaaatctgcttatcggcgaaatagccgtccccgcaattcgcaacattcgcaacgcgcaactccgatatcattccagtcattctaatagtcccctcacctccaactcttcttcttcctactcctaatcatggctaccttcttgaaacagcccctcaaattggctcttgtccagctcgcatcaggtttgacttccaagatctgtcaatgttttcccagctgaccgaaccatctaggagcggacaaggccgtgaacctctctcatgctcggagcaaagtcctggaagctgcaaaggctggcgcgaaattgatcgtccttcccgagtgcttcaactcaccctatggcacgaatttcttccccaaatacgccgagaccctccttccctctcctcccacgattgaacaatcgccctccttccacgccctgtcggccatcgccgtagaggcaaatgcataccttgtcggcgggagtattcccgagctggagccatcaacaaagaagtactacaatacctcgttggtgttctcgccgacgggcgcgttgattggcactcatcgcaagactcatctgtttgacattgatatcccgggcaagattaagttcaaggagagcgatgtactttcacctggcaacgagctgacagtcattgatctcccggagtatggaaagatcggtctcgccatctgctacgatattcgtttcccagaggcagcgatgatcgccgcccgccagggcgctttcctcctcgtctacccggcggccttcaacaccaccaccggtcctttgcattggtcgctccttgctcgtgcccgggctgttgataaccagtcatatgtggcactctgcagcccggcgcgtgatctcgatgccgcctaccacgcctatggtcacagcttggtcgctaacccaagcgcaattattctctccgaggctgaagataaggagactattatttacgctgacttggataacgattccattgcggacattcgcagtggaatccccatctccacccagcgccgatttgatctttatcccgatgtgagcgcaggccagaaatagattttgggagactgcgaaggatttttattagaattctatctagagaatatagtctcaacttgaacattcagagaacttcattaaatcactataacagagattgaataaggtggttattgcctgaggcatcgatatccacagccacgatatcattggctgtaaatggccccactccgtccaatcaaaccccgcacaggcaagcgagaccacactgaatttcactcgaaaatcgaccgcgaactcttcttctgacaatcgatcacctccgcccaccgtcgaccaccccttcagtcagtctattcaaatcaccactccgaatttatcctctaaccttctccgcagagatgtccaacgtcaagactggcaacaagcgctcggctatcgccgatgtggtgactcgcgagtacaccatcaacctgcacaagcgagtatgttgaacacaaaccctttccctgtctacctgcgacgattcgaatacgattcagttctggaggcatatattggacagagaacaagaacctttttcctgaaaatggaatttgttacggaaaagaatgtgtgtggtgtggattggtgtgtgtgtgcatccggggtcgaatgggaaaccaatcccccctatgtcacactaccaccctcaccatggcctgcagagaaatctgcaggtaggacatggcgctttcgtcttttgtctgcttcgcgatagagacagccgagcggagatcttgaaaaagtcttcgctcgcatccacacatatccgcacccggaacacaaaagaagaattagttttatgaagtccactatggccgaaagaccagaacattcatcgcgcagagttttctctagcagatggcattcgggcggaagactgattgcaacttcttttccggaattatagtgccacggcgtcagcttcaagaagcgtgctcctaaggccatcaaggagatccgcgcattcgctacgcaggctatggtaagtttgagcgatctcccctgaccccgctcgggaatcagttcgctaacatgctcaactcaccaacagggcaccaaggacgtccgcgtcgacccccagctgaacaagaaggtctgggaagccggtatcaagggcgttcccttccgtatccgtgtccgcatctcccgcaagcgtaacgacgaggagaacgccaccgagcgtctctactcccacgtccaggccgtcaacgtcaaggaccccaagggcctccacaccaccaacgtcgatgacgcttaaatgtgtcgcttttcgttagcatctatgattccatgttccctgctggggtgtggtcggggttttacaaaaatacaaaatacctttccctttggggccttcttatacattatgtcatagtatcgtagtattccactttgattagcatgtcctagcaccaggagcaacttgacagcaggattattcaaggtcgctcaattacacctatgtctccactttcatatagtttagatcccttggaacctggaggccaacacgtgcattgttcgctcggcatacaacttacgtagactccggggccttcatgcaagtgagtactaagtctctagaaatcatcatttcctttacggtacctattgctttcacgcgatgagaaataagccgttatgttcactgtccaagttgatggtccaattaggattaggcaggggacccgtccatatacaacacctaaggtcttggaagaggattgtgaaaggaaagctagtggtgtttcttagctgatctagggtgtatgtcctagcatggagcaaataatattaacaattataaataaagtacaactaccgctcaggatttcgagtacgaagaaaggtgaaaaaatatgttgctgtatatatcggtgccgctgctttatggtggcgcccagggtcttgctcactgtattccacagcacaggtgatcactcagtgagcagtgagcacttagggtatgcttaataatgtccaaatattgctcaattagcactcagtaagcgctcaggatatgctcagtctatgctcagtctatgctcagtcagcgctcaggtcgaaagaatgatctaggaagccagggaaactgagcgcactatactaagtatgcgaacctttccatttcggcattcgtaagaataaaatcggtctcattgcgctgcttggggcgaaggtatacgtcctcgaaatcgatcttgagggatccgccaattttagttgggtgtcgaacaatctccatcttttgggtgggcaaaggatttgctccatgtgctggaggatcccaattctcgatggtgatcttgctccgagggtaaactgtgattgagaagaccacattgacctggccgttcccctgggtgtgccaccattgtatgtcatgttcaagctgtgagattcctctgatttctcgagaacgaactgttgagatcagcaaaatatacctaggtatataatctttttatctctgttttctaatcgcttcggtactaaagagcagcacatgtcacctcgaaaatttctcattgttccacctctgcgaataaagacgaccacgaattgaaccagtcggccgatgataggccatcgaaccccaacgagtccattacatttgatagcacgccatccccttggttatgattggttgcacgacttgtgtagtggcttgtattcgaagccctggctccgatgcttgcggcttcagttccccaatcattgacccaggttttaaaaaggtcatagcctaaatcctcggtcgacatcttcccagggctgtgtcccattctgtggtgaagagatttctgtagagattcaatacaagcaaccacagatggcgcagagcccacccccattgacatgaccccaaacaaccggagtccggtagataacgcattccgaagcttcgccgtgcgtgtcgagattgattgtgcaagaatcgccagcaacgccgcccgacatgcactaaattccgtgaaggacacccgggcaagacctatcttgtcatcgagcagagtgcacaggttaacgacctcaaacgaggctttcacacaatcagcttctagtatcgactttcctggtagatcatcctctatatcgacggcttctggattgtggaaaaaggaagttgtgaccctctcaatcaaaggataccagcctaggaagattctaatcaaacagcagtcgagttgcaggtgaatggtggtgcggaaatagccacttgatggaccgaggtctctgcacaaccctccgtttggtaggctggcccaccaagccagaaatgattctcgttgcgaaagtaaattgtccaagcattgctttttatggtctgtggatgctttccgtagcgatgcactaaaggagtatgagtagcagttcacttatcgcttaagcattctccttacatctcagtggcgaagttcgccaggttcgatgttaaacaaatagaagttatcatgtttgaaaagttggacgggtcatttgctggtcgcaagctagggatatttgtgggaaatgcagcatcaacttccgcaacattcagagaagtgggcttcccatgtaatatcccgatgcgcctgattttattgtcatcatgggttatcagtacacgaatctaatataactgcatacctttccagggaatacgtggtccagaataccctgttcctaatttcgatggtttctgtatcgagatcgtgcccggtgtatcgcctatgcattccattttggactgccattctcaatgccaaccctaaataggtgaatgatagaccagatgcatcgatatggataaagtaagtccccattaagaggcatgcttgaacagtgcgcagtgaggccgaagcaattataaggggcagaagtttcgacgcgaatcggtagaatttgagtcccagttcgtcttcggagaattgagtaccgcctttatgatctggtacagattggatctttcgatcagaacgaacgcaccaaggagaacccatgtgcgcaaagcgagtgccgatagccagtgtcattagcaagacgcatacagagcttgcgtcgggatgtggtaactgcatttgagccgagtatgagtagcataaatttagtgtctcgcagagctggctttgttccacgtagaaatcatttgtctgggcataattgaaaaaagagttgataagaaattcagcaacatcgcgcggagggaggcactccaacgacgaggaaatcaagcctgtttcgctttgcaatggatgcgcactccactgatccccaaataggtctgttggctcatataccttcatcaatcagttagtcaaaggggcttactgagaaatgccttttggacaaggttgtcagacaatacctctgggagtgtgttacggaggctttggtggatgacctgttgcattctcatagacagagacacataggagagctcacctgcgtactctttggcccacaacgaagtcagctcattggtgtagaagacgaaaacagtatcgcagctttgtagtaggccagactcacgtgttgtcgtgttcgactggggactgatggcaaattctgtatcttctgccaagcctattgacataatttcattcgactgaccagatttcacctgtccagtggtacttgatttgctgatttccaaagccctctctcgcagcgactgcaattcgagcgatatatttgggacataatgcttcaatagtaactccatccagtgaattcgttctctttcgtctgttcggtcaaactcttctctaaaacgtctgtgatgcatatgagcgacatctggagaagcaatagatctagaaattaccggtcggaatgtgcggcttcgaagatacattgctgtccaaatcgagaacatcgagagcaaggacgcccgccctcgcatttttccttggccttacggcaggcaatgcatctgaggatacgataaatcgtcagtgacaagctgtctaccaggatgccatcctacaagaactgcaggaaccaggaagcgggaccgtctcacgctcgagtagctcgtttccgaagttcttgtgggacaggatgccgccatcgtcggccctttctagaatcatccatggctggttatctcgtcttctagcacatgaatgatggaatctgagaatgaggatgagagttctttgttcaccgccctgatcatgagatcatgtcacgtgggaagattgtatgaattgtacctgcccgctaactcaacatcttcatgttaccatttcataagatgtttagtcaattcgttacgcgtcgcctcgcagaaaattacggaaactttcgatggggactgtaaaccaaatacagtagtggggcagtggggcgggagagtgtacccggatccactaagtgtttccggcaggtacaatcatatcatctacaatacaaagcgtgatggggacacggtgattttgaggattttaacagagtaagaggaattgaaaggcactggaattgatttgttcaaaatgaagagtgcaggacttaagtatcgtgataaaatagcggtcaatttcgacttcttaagcaagcaggtcttcgcgtctcgtatacgactcatcgacattacaggaccttgtatattgtattcgtaaatgcgctatgaagttgaactataactagataatatttgccattgaaaaaaaaaaaagcagattcaaaaagtcatacatgtaaatcaatccgcaaatcatcgtccactggtattgagcagccattgtggcatttcttttgcataggtgcctcgacatgccgcttcgacacattgcatgagacttccaaagaaaaactttcgtcctgtcagaccaggtccataatgagcatatttcccagaattagtcatgatggcattctcagttgtcaggatcgttggtttcgtgatcatacaccagcaagtgtctgtaatgaattcgacgccaaagttctccaattgttcaacccaacccgcttggctggctaagctataggaagaccgcccacatgtcaccacgatggaaacatcttgtgatttagcaaggccttcacaaaggagagccaatgtcttgatttcttttattgagaaatgcgggttccccagggagacgagatcgatggactgatgctcatgtgcactgttgagcttctgccagggctcaatcagatcttccattctaacggcgacggacggcacctggtgtgtttcgtccatgatattgctgagcaaggctgcctcgggggtgacacccagcatatgaaacatgggcgcgctagaaacggttgcaaacgcagccccaaaggctttcaaatcatctttggatggcgccaaattctgtagtccaataaccacgggaatgcgatttgcagcaatgcttccgacgtggtatcccaatatagggaaaaaggaatcgtcaataccctccacatcctggagatcaactgtcacgatgagtgacgccattctgttgatgtcaacatgcggtcctgccttaggagcgcgcccagtaagggcaatgcatatatccagataatcgggatacttcatggtcctagccccaagtacgctattggcatagacaactgcattagattctgcccaagcgacttgctccccttttcttggtgctgattgcagctgatatggcgcgcaggtaaaggttggcttagagcccatgtcggtgtatgccttcgctaattttgcggccgcttccccaaatgaagaatcgacaccttgatcacgccatcgctcttgatcgatcgagatggaattgagcgtggtaggaactcggaccttccctccccagtcccggagcttctctgcaaactgaagagacccggagcctgtataaacacagccatccacatgaacttgagtcacattcatcagttcgtgggctcctaggaggcctgccatccgcaaaacaatccgaattgcgatacgagaggcctccccgtggagtccttgaagcagttctttgtcgaaattcgagagctgcacatcctcagcaaaagagcctccgtttggctctttttggagctctgttcgtgtgtcactgaagactctatcggaaacgcggtgggagtcgacgtagatagcattccctttcattctcaacattgcccgaaaatccttcggtttcaatacgacaaccggtatggtcttcccaaaaatctcctccgagaccaacaccccgagagtgagaataccctcctgtctttcaaaaaggattgctcttggtcctttcttgttcaggagaagttccaacatgacaccacttccagagcatgaaccacgaccactggggatagcaaggacagtatcctggagatggtagccactcaaatcgtgatgacggtcaataatctctcctgtctgaggattgactccaccccagaagctgagctctaagtcacttgcgatgagtgtgccgcaagccttgcctttcacatgagctgtaccctcaacaactaggccaacgtgcggactcatgttcgaatggagatctctgaatagccggtctccgatgaggtcttgtatgcctcgaacagtggttacttgggtgggcaaattgagtgagagaatatcgagttgatcgcttatctcttcggggtatatccgcgagggactgatatcacaatcatgtacgcctaggtcgaccagtctcgcacccacaatataattggagtattacccttgagagcagataagggcagcggatctttgcctcggaattatcacaattcctttggcttccccagttgccatctccagtaagcctgtaaacccggaacataaagagtggaaacaatgggcgggtgtgtacccggacccaccaccggctgaaacaccgaaagtctcgttggcctcaaccccggcagtacagcagtgaataggcgcaagtccgcaaaacacctatttggaccaccgccgagtattaacgctctgctcgtgtaccgagttcttttggagagttagagaatttattgacatttttctgccacatatacaattgccttaccaccgtatttccgtcaacttctactgcccgaaatgcccgagttttggaatttatcttcccttcagtccagaccgccttccgtgcacctttttctagaccgaggaataaaagactggcatcggatcgccataaaagcctaacgctgcaagggtagcaacttgcctccacaattttagctcatcttggaagtgttatcccaattcgatttgactatcacccgggccagccgcactggagataagtcctctattcccgggaatgcgtcatcaggtgatgtctctcgaaaggcatgcctccggaccgggggtgcagtggctgaaggtgtggatgtatggtacatagcagcccataacagtggagccccctggtaagatacaataacacttgatttgccataggctggtggaacttgcccgaaccatttggggattctagtgactgacgtaatgcgagaggtttctctacactccaaaacataggttacatagggttctgggatatgttctgtaatacgttcccgccgcgagcggggttttcggccgaatgcgagaaatcgcattcgcatataaaagcgcactgttctcatagctgagggattacatcagtcgagcttcatcactctagtcatatcgtttggaaagaggaaggattcactgcaaatttccataatgtgtgccaaaatactactggcgtttgatctgtatggcacattgctgtccacggaatcgattcaaagtcatctgcagatacatttcgagccagaaattgcaagggcaatttcggaaaaatggagacgtttccaattggaatatacttggaggctgaatagcatgtgtgagctgcctagaatgttccttgcatcgatagcagagctgactcatgatagcacgttacgaagatttcaccgaggtcactcggaattccttgttgcatgcacttgcggagaacggtcaatcgcttgatgacgcgagtatatcacagttgatgatggcttatgataatctgtctgccttccctgatgtcgcgccagcgttggataaactgagccaggaaagccttttcaagccggttatcttctccaatggtagtaatgtaatggtgtcgaattcggtgaatcgttgcctctcgcagcatgccagcatttttcacgggcttctcacggcagacgacatacaacgttacaaaccctctcgactattctatcagcgtctagctgagcaattcggcaagggacttgcaaacgaagatatatggattatcagcgctaatccgttcgatattgtcggatcacgcaacatgggcatgcgtgcggtttgggtcgatcgagcaggctcaggctggaaagacgctgtgatcccggatctgaagcccacactggtcgttcatagtctccaagatgttaccgacaagatccaagcctatatcaagtgattgtccatcgaagaatctaccatgggcgaggggaccagcacaatcggttcttgatccgtatcatacggtcctcggcctttctcgagggtaccccaccgtgtttcgagcacaatttcgctcgctcgtgtttgaaatagacgaattgttgtcttttgattgatcaatatgaagattgtttggcgtcacatctgcgggctcgttcaaaatggtcaccgtaatagaagctgattggaagacgtcacatgtgagcgtagaaagacgccctatcgccgctccatgtggaagaggcttcgtaatgtgagggaaacgaataatttctcaccagtaccgctgtcttcgctgcgtctgctaccgttcctctaccatcttagtttgtcccaggtcatttgggctagatctgatactgcgttcctagaccgcagtgccaggtaacccatcatgtccagacaattttcttgtcccccttgactgtttgaggtcacctaaaaagctattatttaaatgacctcctatgctctacttgctaaaaatcagtcttggactaattcctttcattttgagctgcctgctgagctgacggcagtcctgtagagtggcacaaaattaaagaatacattacatcgaacgaataactgttcatcatgaggaaaatccaatcgaaatcactgtttttggaaatcctcgcgtatgatacgtactataggcaatatttttcctatctcatcattcacagaacactcaccaaccaatcttgagccaatttgaaacctgggtcacctcccatgtgggtctcattagggaaaagcttgacgagctttggctggccaaaatcaagaggtatcagtgtgtcttcggctggaaagaacccatcttttatcccctatcaaaatttgagatttaccatagcaataataattaccgccagggtggagaaaaacttacattgatcataagtagctgcgttgaattctgttccaatgtaccatctaggacaagggaataatcctgcatactattctgtttgaactcatcgaggctctcgtaaccccatttagacgtcagcgcaggggtcgccctgtaaacgttgttagtaattgatacaaaaacaccccaaagcaactatacctaaacgcatattcgtggtcgtcattgtgactaatccagtccgggctaaatgcttcatgcaccggagtcccttgggcgacgaccgaatgcaaacgatcagagtgggtatgtgccattctaactccgtaatagcttcccgtcgagaatgaccagactccaattcgtccggtatcatattgaggttggctttccatccaattgagcacactattccatagacgatccccggccaccgggtccgatcggttgcttggacagtcacctgttcctggcacctcggccacaacaacctcatatccctgattgacggcccattcggtcaatggattgaagtcaggccgaaattcgtcgacgccagtaacaaaaagaagaactgggtgtagtatggccgaggattccgaatctggaacatgtcggacagcaaccggaatcgtaggtccatccccattagcagcatatgtgtgatttatttgcacggaatagactggaggatcaaggtatctattaagaattcatgatcagtgcttagctaccacgccaaaggccaaaaatagagatcggggatttatatggctacttacttggcgctcttgaagtaagcatcgacctgcattctccaagcaagctcttttgtgggtataattggtgaaggatatcttgcaatacgtaagacaacagcagcacgactgtttctctgtcaatcagctccctttcccgagcggaatcattctttgcatgtcttgcaaagtgagcactggtacatacgtatacaaatctcccgcaatctgtgtattccggtgattttctgcttcctctgcccgggaaatgagatctctggcagttggaagaaaagcattcacatattcgtcagtatttgcatccgatatattatactgtagtaacatcaatatgaaaaccccccgaatactcataattgaagaccctttcagcttaccttgatcagatgatcaaatataggatcaaagtctgacacatttgcgtcataaaagggctcggcctgagcaatcgcctaggaagtttagccggaattcaatctccaataaaaaatgaaaaagtatgacaaatttaccaatggctgccacagctgattccacaagtaatcaatatttccatgttgaggttgtatgacatcaagatcctttcctaaaagccagtcactgcaagtcaagacctccgaggttgcagcactaaagagcatgctagcaacccaaggaagaatgccttttgaaaccattctagaactagatcaaaataaaaacgatgatagtaaaggcctgtagagatttactcgcttgctggaatatatcaaattgttgtctcttggtctatcttccatatataacttcacatctcgggttttcggagttaagagatgaaaatgttatatttttggggccatatccagtattcgccaagatttttcaaggcgtacagattgtcaaatgcctcggaaatagagccgggaacccatttatagccggttgctctgctaacatagttggccgacagcaaggacgtgcggctatgtacaatccctaggcattatctccgtgaaagttattcaacccaatgatgaatgattccaggaacgagtcaagccatcttgtgtccctgtttgtttctttctcaattcacttacgaaggcagcctatctactacagaggctcaggatctaatacagacacaaagaaagggaggagggagaggtcacaccagcggagcctaattttcctccctagactggaggtcgtcgacctccaacatgttcattatgtggacttattggccatcactgtaatatatgcccaactaagcaataatttccacatttggctggtaatcgcgatctatttgcggagtaataggattatgaccgggaggctactgtattgtggagcacgacggagctgccgcattaggtttactagtgacattttgattggtggatatattacggacgtaccgccaccaaacgatgccccaccactgatcgggcttaggaccttgtaaagtccgggggataaatgaccccgtgtatgagaacatgaggaatataaataagatatttctttgctctagtctctcacttttggaaccatcaaagcttctgaacattaaaaacacctattcatcatgtttgcccctgcttgtaccccaaaatcccatctcggccgttaccgtctcctcgcccccactgccagcgttaaggtcagtccattatgcttaggtgcaatgaacttcggtgaaggctggtaggtgcttgatatcaatcaacgctctctccaacgctacaattgtcaacaggaaagaacgactcggcgaatgcaacaaggatacatctttcaagatcctcgacacatactacggcaatgggggcaattttattgacacgtgagtcaaacaattgttgcttgtctctattgagatagacctaacgaacagaagagccaacgattaccaaaacgaagattcagagaaatggctcggcgagtggatggaagctcgcggtgtacgtgatcagattgttctcgccagcaagtataccactggctaccgcacccatgttccatctgagattcaggcaaactttgtcggtaataatgccaaaagtttaaagctgtcggttgatgctagtctcaagaagctcagaacggactatattgatctggtatggccactatgagataaaagaacctgttatagctcagcgtttgctaaattttggatgcagctctatgtccactggtgggattttagcacctccattgaagaagtcatgacctcactcaatcagctggtcctatccggaaaagtgctctacctaggcatcagcgatacacctgcctgggtcgtggtgaaagcaaaccaatgtgagctcacctaacctcgaccgacgaaaacacactaacaaaacccagacgcccgctaccacggcctacggcctttctccgtctaccaaggcagatggaatgccgcggcacgcgacttcgagcgagacatcatcccaatggccgcatctgaagggatgggtcttgcaccctggggcgtattagggcgtggcaacttcaaaagtcaagcgcaatgggaagaattttccaaatcaaagagccctgggcgcggaagcacagctacggatcaagaaattgcggtgtcgaaagtccttgagagtgtcgcaaagcgacatggggcggcgatgacaagtgtggcgctggcatatgtcctgcacaaggcgccttatgtaacgcctatcatcggcgggcggaaggttgagcacttagagagtaacatccaggcccttgggcttgatttgtcggatgaggatatcaaggagattgagggggcctatgagttcgatattgggttcccgatgaatttcttattccgtggagagaccaaggaggcgcatcctcgtaattcgacgcttcttaactcagccgctaagtttgattaccctgatttggtgcgtgctgtcaagcccaaagacctagatgcttaagccttggtcgtatttggattggttggccacgcggagagctggacatgtaattgaatgtcatctcaaatatagtcaaatcttgacagctacaaattccatactaaaacttcccaacccctctgggccttcctttaatctaattcatcattccgcctttaatcatgatctctgtggaactaatccaatatcgctggcttcatggttttatcaggacgaacgtattgtacttacaccaatgactagattgcgcatcaatacgttcaaccctttgaaagacaactcgtgcgggtgaggagtgtccgaagaatgctctttgtgatgggtttggctcccttttcaccttcgaaatggccaaactctgcgaacatagtggtatcttcatcttctgtatccttccgcatactagtaatttgctttgaagtctataagcatcgtcacggaggcaatcgagaaaccctaaaattctgttcggtatttaaaaagcatgattttttggctgaaatcaattcaattcgcgtgaagaccttcaactaagcacaatgtaacttggatttttaaggcacttagcttatcaatccgagaattttataactaaccaccctcctctcatttgtattaatgcaatatctctaagtaccacaggaccagttgaaaatgtaaattaaaaagctatataaccccaaagataatcaaaatcaaagcagagaaccgacgtcgaacagcaaagcatcgaacaccgtggaagccaaggcggtgagcgagagctctccaaactgccgacgtgaggacatcatatcagctctcttgcagtccgcatcaaccatcaacatctccaattccgtccgagtttacccaccttcctctttaacccagcataccgtcctctgtcagtgataccaacttaaacagcacacagatctccaccatggagtctaagatccccgacttcttgctcgagcagcaagcacaaggaagcccggagacacaaccctacttcctcaccttcgaagattactgggagcgcaaactatggcaccagcttacagactcgttggtcgagttcttccgcatgccagagagtgctccgcatcgcttagccctgtttaagacattcgtgctcagtttcgccgaccgaatcaaccagctcaagtttgtgtcgctgggattgatggcagcaacagaatgcgcaggttggtggtccacagtctagcccgaaagctcaaaaaatcaccatgatgagtgttcgattgcgttgatgtaagctaaccatctccctctagatgaccaagaacgactagctttcctcacatccctcgccaacaagacggatacgcccgacacacaggatgcatatgtctacgcgctcgctgacgtggccaacgtcaagctgtcgctgaaggatctggaaggagcacagacggatctggccacctgccagcgggtgctagacacgttcgactcggtcgagactgttgtgcacgcgtcattctacaaagtgaatgcggactactaccacgtatgtgattcgacttatcctatgtccagccggacacggcactcaaactgaagctaacaccccctccaggctaagcaagaattcgcctccttctacaaaaacgccctcctctacctcgcctgcattgacctggaagaactcaccgagaccgagcgcgcatcgcgcgcgtacaacctcagcgtggcggccttggtatcagacacgatctacaacttcggagagctcctcctgcacccaattctggactcgctgacccagaccccgcacaactggctccgcgaccttctcttcgccttcaacaagggcgacctgactgcctacgatgtgctggccggtaacatcagcaagaacaagctgctggagtcacaccgggtattcctgtaccagaagatctcgctctcggcactgacggagatggtcttccaccgtccccctcatgaccgctctctctctttccaggctatcgcgtccgagaccaaggtgcagccggatgagatcgaacatctcgttatgaaggctttgtcgctgggtttgctgcgtgggtctattgatcaagttgcccaggttgcacagatccactgggttcagcccaaggttctagatatgaagcagattgatggcatgcgaaaccgtcttaaggaatgggatgctggtgttaatcagctcggtcactggatcgagggggctggtaaggatgtttgggctgcatagatgtcttatctcacttgtgttctgataagttctattataatgaatacaatggtgtcgttcttatggtggttccaatatatttttagttcgaatatgagtgagtctacatgtgatctacatgttttcctgactcgatatctacttcactcatcaaggaagaataagaagaataagacattcatagttctagaataacaaaccagaacaacttcattccgagaaaagaatctatatacacaactctccacatcccctttaatatccattaatcgaacactccaaagcagcaaaagtaggcggatcaatcccctcagtcctattatgacatcctttaggctgataatacaacttccaagtatcaaagcaatcacaatcagtcttagtaaaaaccgagcaatacccattcttgagcagccacgactcgggtttcacaagtttgctcgcatcacaactagtccacgtgaggctattagaagtccaccatttacaggtcacgcctgtctcggtgaacttgctattgaggcctccatggagcgccaagcagcccttgtcgtcgaggtattctttgttatagccctcgaggtggtagtagtcgccctggcagtttgcttggctgtatagtgtgatctcccacggtgccgtccagctatattgagacgcgcttgctttaggcgcggcttgtgttgttgttttttgggtagtagtttgtttagttgttctagtgattttcgtggctttgatggtggtggttccggtagtgctggacctggaggtagcttttgagcctgcgccggtgttggtggattgctggactccggttgcctttgccttggtagtgacttcggacgtcggggcctctgtcgcccctttcacggtggctgtaggaccggcaggaggtgcacggtaaccctcgcaatataaatcggagacaccacattgaccccagaacgcacactggtagttgtcaggactagatctatacggggatatggactttacttacacatttggactcagcacatgggttcaaaccagggaggtcggcccattttgccggacgtgttgtgccaggtacctgtgggccgcaggttgcatgcggaagggccattggcatcggcggtttcccagcgctgagacaaatgaagtcgccctggtatagtcgtccgcatccgagccacgcccaggtgtttttattgaagctctcgatgtcggcctcggtgatgccgtgtgctttggcaatcagcgcacacgtatcataaccctggatgagatagacgaagcaatagccgtcgctggttggtaccgggacggcggctgtcgcgagacgcaggaagagaagccatagagcaaggaagtcgattcgaaagagacccatcttgttcttgtgtagacctgggagatacagccatttggtcgagtaacaaggctcattctttatatagattgatagagataatcgcggccgtgtaatcgaaactggatagagacgctgcatgaaagaaacagagctgtttccgagttagggcatgacgcatggaattggtcaggaacaatccaatattcatgcatgtgatgaatgtgagatgttagtattgttcaagggcctgacaaagactcggggaaatgtgtcgtatcggaagtttgacatcctggatgctttcattgttcgcttgaatcacccgtgcatgacctctctgatatagtatgcataaagttgggggcggtctttgtccaacctctcttaagctcttctagcgtcaaatgccgaatgttctttgatcgtaattggccgctgcgaagcgatagatgcttgggccttgagagtaagaatcagaaatcgagtcagttctttgaagacagggacggcgtggcaaatgaaacacattaaagagggcgtacacattcagagtacatatttgagcagaacatgtacgtacctagctacatttaaatgcacttggatgtgtatttgcattgcattggtattgaattggtgcctggacgtcagccgcagttgatatttggacttcctgctgccagtggtatccagcgcgctagtcatctttgtttctttgtcttggaagtagtacgtagattcctggactttatttattaatatcctaagcattggatcaatgcggcaaagcgcgtgacacaatgtacaatatagtaatcagaaaatcgacgaccccagcaacacgcagccaatcaaccaagccggccaccacacacaccaaacaacgacctgggtccacataccccaaacatcccaaccgaaagccgcctgggtgaggacagtctcgactgagacccccatataccagcagacgccaaggagaacagctggcggggagacgaggttgagaagcaccagacccagactggaggttgccaagcggaatggcacggagcctcgcaggcgagggatgaagctaagtggcgcgcagagcagaccaatcatgaatgaaagggagaagttgagggtggcgagggttgagagggagagacccagtaggaggagggagaaggattttatgaggtggtactgttgggggatgattggttttgatacaccgaggccgttggagagaattgcggcaaggagaaggggtaggatgatgtccacgaccacaaatatgtaggtggtagttgtgaagtactgtagattcgttagcagctattatcattgtggttgtagactggcagatctcacctgatggaagacattattaaagacccagagcgggacaaggccgagtagatggagtccgacaacaagcgagagtggtaaagcaaggtatcgttctgcgatagtattcctttcgacaatagtattcgtccccttctcttcggtgggtgccttctcattctttggtttagcacttggcttgctttccggatagtacccagtacgtatccagagagcaattgccatgatggtgaagtttccagcgatcaacatcgcgctgggcaagtaggttccaatgctgacaaaacggttggactgcatgagcaggtagaagaaaaagctctggtgcaggtgctctagcaagttgttcaagctgcgacaaagagactcaatcgtccggcccagggccatctcatcctcccatccctcgcccttggtctgcagtgtgatagcgtcgatatggtacggcatgaagctgctgtgtgcgccggtggcatacccgagaccctgcttggtcataccgcggaacatagtctgcagacgatgctcgtagctgtcgtcgtgaccccacatttcctgtagattggccccgatgcccatctggccgcctgcaatggctacagctgtattgaacaggtcgaggttagggagttggccattgactccgtcatatacaatatggagggtctggaaccggtgttcgaatgggtattcgatgactagtgcaccttgcaatgctccactcttcaaaggaagtggctgcaccgaagccgggtgcatatcgtggtaggcatcgatccaagcctgagtgccagttttactgtccggaggaattaagaagatgatatccttggaccataacgaccatcctagatagctgtcaataactcgactagaggcacgcaaccacgaaactcactcttgaagtatcttgccaatgtcaaggcaagagtgacaccattcaggttcagctcatcatcagccgtcttccacggcgcaaccagcacaatcgcctccgtggcatcaccgcgcggcgcatggataatggcataagtattctcgccctggtgcgtaatcccagcggaggtgtattcgtatttttgcgtggcaactttaaggcccgccgcttgcaagattgattgcaacttgtccgagagcctgtcgaagtatcagcgaatagtccagcctgtgcccggttcatttgacatacgccgctgtcacttccgcctcgtctttttggccgcctctcgcctgtccatcattcaacaatccttccaattctttcttgtagccccggaagatgttttgctcgcttcccgtgaaatacgcatggacttggcccggcagtagcgcattctcggagatgtaggtctgtcgggagtactcgtttagagggaggagaagtagccagacgacaccgacgactatgcagatgaaggatacgagattcgggaggcgaacatagaggaggttggggttattccgcaagttgcggattgcagctggcatcttgttagttggggtcctcggtgctggcgccaggaaggacaggtggtattaggcttctttgctcacattttaatgccattgactaatgaccatcgggaaatgagttcccgtgccgcgaaggcgaagctgttaaatgagcggaataattggactgaactggagtcttacaagtcaacagtggagatagagctcccgttgttgatgcgcgaggaatttacgccgaacgataaagaccaaccgtgcaaattaattgtgagtatgcacacgctatgctattatccaatgtccccgagtctgcagcaatataaaaaactatagtggaaaatatacattaaaatgaaatgaagaatgcatcaataccgtgatcaggttcccactgggtagatcacaagtagctcatggttgtttgattgttgctgctgacggtggcagggttgctggttggaagaactccatagcgaccgtaggtcttctggtcgacagagacatagtgaggcagacgtcccaggaggttcaacttgccctcgatccaacggaggaccttctcagggggcacaaacaccttgagatatccgaggccaactaacgacgattagcagtgggaagggttaattcagataagggaactcacggagatagccaacaaggatcgcgcagagatgaccaaggaagctcacgttcgagatgaggatggatacaacgacacatgcgaacaggggtgaggtccaggtaggaatcttgtacgggccaagactgaagggcgttagtaacattggagcaagttttccaagtgaatcttacctgaagttagggtgagacttgtatgtcttgatggcttcagagccgagaagcaggaaaacccaaatgctggattgaagattagttaccgaaacattcaacctagtgatctgaagcttaccttgcgccgaccaccgaagtatttctgtgtaggataaacctctcaatcaagatgtaaagtccagcggggacagtcgagagagctgaattattcaacattagtcaaaaggccgcaaacgtcgcgtttctagagcactcacgtccaataaacaacgcaatagcagtcaaagtgccatgctcggcctcgaatcgctccaacagcggtgcaactgccacggcattaaagaaagcatggaagaagcccgtgtggatgatgggataggtgttcagtcggtacactagtaacaccatcaagtcagcatgcgcccgacatgcttttcaacatgaaatcaaacatactagtccccaggttgatctcgtctggaatcaaagcgccccattgcacaacactccaaatagtctggaattcgagcagccagaaggccagaatgatcagcagcaccagtcgagtaaacagcggtagtcggaggaggtatgtccgtatccgacccggattgaaaggcaacggaggtaaagcggcaggggtcgtcatgattgctgaatgatgctaatccgtttctatcactttcgaagaaaatagatatagtgacgaaaccactcagggcggccggaatagagtcgggctgacaagtcgggatataccgcgactttgaacgagaggggttgcgatcggagccgttggtaagaattgacaattattcaacagtcagatggtggatcgaacaattaatgactggagagaaagatcagttagattctgttttcctagttgatctgccaagccgatgccagggataactcaccaggcgcacgcgatcctgggtgaaacgaagacaagggacaagaaccccaactgaaaacgagtagccttccaaatgtcaaggaaacaatctgaatggaaaattcaaactcgaagagacgtcaagggagaccgaaccattaaagcgacttgttcgcgaatattacgccgcgcgataaagaccaaccgcgcaaggtgtccgggtagacaaaccccgtggtggtgatttgacagctcaatctaccccgtgctgtctaggtctattcagcacaaaatgtgtatatcgcctttgcatttgctatctatatttaaaattgtccaactaatttacaggtgctcgttaaaccaagcgatggcctggcagaaagcctgctccttagcccacttctgcttggggtccttcagatcgccgcgaacagcgaagccatggctaacaccgctgaacaggttgatctgccacggctgggtagtcttgataagaatatcctcggactcatggcgaagctgggtagtgaagatcgagtcgacctctgttgaaacgcgaaaattagcctttgctgcatcctttcaaactaatatcctgcaaacaacttaccagcagcagcgatagacagaggccccttaatggcgccgagctcctcgtgggtgacgaacgaagggtgcgcaatgtaaccaacgtcaatcaggccgggctttatgttgcggcagacgaactaaaccaatattgtcagccaggggttatgaggtattttcggagattgaatctttagatctggactatagatacataccttagccccaaagcagtagccaacagcgccgactctcttaacgccgagagtctcccgggcgtacttaatagccgactcaacagcgggctcaacgtccgcgggcttgtgcttggggagccatgcagacaagtcgaccttgccagattccatggctttgacatcgatcgcgtcgccctggagaatatccgggacgatagtcaggtagccattgttggcgtactcgtcggcgaggagctgggcgttggtgtagattccgaagatatcggtcacgaagataatggccttctcgggggtcttgctgcccttggggtgggcgatataggcattgactagaaaatgactcggttaaaaaggacaattttgggggcgtcgggggcgtcgggggcttgagnnnnnnnnnnnnnnnnnnnnnnnnnnnnnnnnnnnnnnnnnnnnnnnnnnnnnnnnnnnnnnnnnnnnnnnnnnnnnnnnnnnnnnnnnnnnnnnnnnnnnnnnnnnnnnnnnnnnnnnnnnnnnnnnnnnngggggcttgaggggcttggggggcttcgggtggctgaaatagaggagttttataaattacctccgttgatagtcttagtttcgccggcgggagtgccttcgtgcttgaaaccagaggcacagcaggcagcgggagtgttggaagccattttgaaatatgaaggggtataaaatgtaaaaatgaagtacgatatcaaatcatggatagaggggttgcttataaatgtcccttgggtgtacaatgtcgaacttagagtctttgacccatttcgtcagatattatttcatccaatccaattggctgattgacgtattactccacttgcccctacttgcccctcatggagctctttggctcctaggggtaaacctcttggaccgccgccgttattaacattctcattgcttatgtaggtactaggtacctaaggctgaccctctggagctgaggctcaatggtcttgcactgccttcgaatatccgacttgcatatatccatggcttttgcccatctagaaatgtatgagagtaagatttcattgcctcggcagtcggcatctggcaatgacggaaataagaccctaactccttatatctaccccaacacgttacaatggtaagtttgaagagataagaaatcacattgcattcatagaaacatctgtactgcatatatctgggatactaggacatccagtcccagtcaatcccaccaaccgtattaccacattagtccattcacacattgaacgtcacaaaatatcatgtccgaggtcctccaagaaactttccttcccggggtatctttctgcaggaaatattatgtcgcatgaagaattcacaagcaaaatgactccgtatatctcatgaaacaaaaaacctcagaagtgtaaaggtggtatcaaaggaaaacaagtcgcagaatttttcactcgaagcggaagtttggctgagggcgctgtgcgcgcctcacggcccaggccttgagggcaattgtcaagatctcataagccataacgaaagcactgaagcctaggccgacagtgaaggtgaacattgcgtccacgtcgtagtactccatagtttggatcacatttcgggtctagatctttgttagtcatgctcttgggggaaactgtaaagcttaattgcacttacactcatcatgaaaatcagacctcccgagattaggcagaatgcagcgatgatctcggtcgggggacgagccgggaggtacgaggtcggtggcttgagatataacagaacgtatgtcatgccgcgcgacagcgcaaatccaaccaacatgttaccccactgcttgtgtaccatagtcgatgtcatgctgtcctggtggtgcgaccccatcatcatgccaagcaacataataactaggggtggcatggggttcaaggaaacgccctgcgacctcggtggcgtccaggcttcatccgaggtgccatgagcaggggtctggaggatggtgttgttgaccaattcgcggatccaggtagattcgaaaagcataccggcctatttcaggttagtcagattgattcttataaagagccgaaaaaaaggagatgggacgtactaaaccgccgccgaagaacagcacagaaatcgaaacgtgctcgaggtctgtagcagaccatgccttgcccgcaccggataggtgctcgagaaagacatttgtcgcgccatataggaaaatgacgaatgattctgtggcttcagctgatggaaccttagatttccagccgacaatagacgccgaaggcttcttgttccaggcccagcccagatctgcccagcaaccgatataacgtccaagtgtcaggacaccgtaccagaagaaaataccacccttgatgaagtgagcaaggccgttgaagatttcatggcccctcatgataccaccataagtcacagccccagtcgcaatacagacaaatccgaatggaagaatgacacggtcaacgatattatacacgacattcaaaacgcggagaactcggccggggatcagaccagggacagtcttggacaagaaacgaccaacaccggtgtgacgaatccagccttgcggagcggtatccttcggtagttcgtcgggcttttcaaatccgtcgtaatcggtaggcgactcgcaacacgatccagggctatgaatagaagacgagttgctatcggttccctgaccactatcgcgagaccagcgatgctcgcgcatcgcaccgttgaagcaagcatgctcgttatcattatcgtccgtcgcgacaggcagaaacgcagcgtgttcataagagggcgtattcgacttattcgactcgccgcggccagcgtaggcaaagagcaaagccaggacgacctgggtggatacagcacacgtcgcaacccagccgagcttgtggtgcgcattgttctcgtagaggtctggggtctggctgttatagataaccccaagtaggacaccgaacgcgttgaaggccaggaagaggaattgtgatagaatcgcaagccgtgagcgtgcgatgctcagcatgacagctatttgagatcagtttctgttttctttcatgctcagagctcaacaacagctacttaccgacaggaagaacaaagcaccatcctagaaccataagggcaatgtgagcaataatggtgctggagtgcttgctatacgcaaaatagctcatgggaccatcggtgttagcttgcatggcggtgggtgtaggttgcggcgcgtcggtgctcgtgttcatatgcattcccatgtccattgattcatcgtccccgtgtggaagcgcggtcgcaagcgatgcgagtagtagcgtgaaaattgccgccctggcgactcgagtggctaaaggccacatcaggaagatgatgtgatatactgcgagaaataataatgtggctgtatgtgcaaaaaatgcaagtggccgcgaagtataaggctccaaccagctgaggtcgaagctctatggaatcgtgacgtagcgagcctgtcaagccggtagctgggcccgtatttattcttgctttttactcctccaagtctagacaggactactcggagagtgacgaactagactgtccaattatctgtagttgaaaatgaagctgtagggctgaagtatgcgacaccaggagggaatgcagtatataagtccaggcgagctaggaatgaagtaccgggaaacttgctaataaagctaaatagaattttttaaaaaaaatagaaaataatagaaatgagctcgccggtgccgatttccaatgctcttgaaaaaaaaaaatatggaaaaaaaagtgcgtggagaaaaggattgacgccctcacggcatgcccaactcggtagatctcatttctgcttgtagcatgatgcatatgtaggtatcctatgctttatttaaagtctaagtgtcacgaactacgttgaactatggaaattgacgccaaagttgttgatatatcgtttatgaatcgaattttcttagctcttcctgtcattcgggtgtctcgggagcgtctaagaaatgtggattttggtgacttcatgagtttgggagcctggaactatgacctatgactacatagagccccaagatccgggatatttgcaatgggaattcttgtatggagtctggagggcgcagttctccgtctgtacagcatctgatgccttacgtgtggcacgatgtatacagaaatataggcgccttggccaatgacgtagtcgatcgttactctatttggaccgtgaccgacctgatcagctctgtatgcttccgttaggccttctatgtgtgtctaggcagacataggatgcatggaataggatgagcatagcatgtgcggagtatatatgcatgcttacaatatagcttcccacccatcatcaggttgactgactacgtgcaagtctaacgttggagatgatcaccagggatctatccccccaatcaacgatagcctacggggtacgatatgaaatccttgtcaggtgtttccatactccacccatctcggcctccctcgctttgtttcccgagccgcaattttgagctggcccgtccttgtagtgggggttatagtctgatcgtaaccgaatgtcgggctctatgctccgacatacgaaaacagagcaataagagcaaatttgagcggaagttcggcaccttgctttgttgcctaaagaggtgatattgaagtttgcgccaagtactgctactctgtactccatagtagctgcccttattcccgtgggccgtgaataaaccgaaattaagaccgaggggtggtccttgcatctctgatgcacagattttgtaaacatctcataacatagtggcatagtgggactccatgcgaaaaaaaaacaagccacgatgcatatcgtcatgtggtttcctaaccatcctggtccaagcttgcatattgtgcaactttaccataccaagcccccgctgtactccattctccatacttagtacaacactgcattctactctacttcatctactcagccaacgccacaaggatccgtcatctcccagtacagaaataagcgagtgggcgttgacaaaagtcgtgccaagaccgagccgaagcccgatcttggcgattggagaaccgtatccgtgagcatccgggtacatgagaaaaggctgggctgttacatccacgcacctgcacgtccctaggatctgcgttgaacaattgctaatctgtgaaggtgagctcttatgcccggaacgcaaactccgctttacttccgagctccgagactcggtgtaagtacagatgtctccgactgacctcgtgttgctaatcaatacagagtacggagactaaccaactaactagtgcaggtcagccgtaagctgtgatatgactcatgctttgtacatggcataaccttaagccgctaccctagacgtctgatttccaatctcgactaccgcccaacgccatggctttccacacccctcctctatggcggcagtacccggctataaccagacggtgtgacctgagatcaagccattcgacacgtccagaactcccaggaatattgcctggttgagaatacctaggcagtaataatcgggagtccggcacaaattctatccgcacccggcgctgacctagccgttccccaggggtaatggtaataatcggcgaccaatgagcagagtgtgaatacctcgagatcccgtatgatcaacacggatgtaggacttgggcacggacacgaatacgatggaatggttagggactaaaggccactcgcgctagttggaagtacaaaacgctaaaccgcctactacgtcagtagcttagtgctggggattagcgcattcgtgtgcctgtccgtagaccaatctaggtccgtggcctcgttgtgtagttaatttggctcatattaactaattctctgtagattaaaatctaatctatttggcttatgatagtagagggccgttatactattgggagtctttttttggagtcattttggggtatcttttagggtatctcagtgctatagctcgaaggatgattacatgacggtgacactttctctaaggcaactaccttcaactctcagtcatcgcgcgccttctgtagaatacctttcatccgatcatacaaccccatatcttcatttctccacctgcttccattagggaaaacagcctccctaagtgtattaacacatggaactagtggctgatagtactctgtgaagtactcattcgcggatctcacaaaatccgcttcatcggctatctcgcctttcttcaggccagctaaaatccctgtatccataaagttccacctgtcatagtttgcaacagttcttcccttgcctggcgcgtcataatggatgcatatccaaaagatcacccagaagaacgattcaaggtcatgcataaaagaacgcttctcgcccagaagagagccaattgccataaaggcccttgtgccggtctttccagttgctccagatacaccgtctcgttgttctctgatagctagatcaagatcaattaagaacgacggccacgaaggattctctttatcttcattgatcatgatattattgattgagatatctcggtgaaggatccctgcctgttgcaaggactgatgtcctgtaatgcaaccctccaatgcagcaagcagggacgaatgagtgctagccttgtaaattagtttaccatagtcgcgcaggacgacacgccgatgcactcggtttagcagtaggttgctggatgcattggtattagataccttggcagcagatgccttggtaggagatgccgaacatgatcgtttattaggtggtagaaagaggccactttgactagaagagcgcttcacactggacctgcctgtattatcaatctatcgagaatgagacgctcggtccggccgttctgctctatcttgataaatcgctggccgtctttcgaggtaatcgtagggtcaaacctacattcctcctcgctcatccataggaaaccgagaatagtggacacgaactggagcctatcctcattgatatcaaaccgttcggatgcgactcccccgagacggtcaaatgcccatatccttataaaggatccacatatagtaaagcctaggacaaatcggcgtgtatcttgggccgtaagaacttccctagtatatctccctaaatcaagccatggcttagaagctgtgtcagctgccagattgctttttagctctctaggaacgatgacctgtgaccaatgacattgggtatcctttctagcggtagtatcacttataaagccgatgtctagcttacgctctactgtagaaccctttataggtatattgggctgtgcgagtggccttcgcaggtacgtcgacgcagaattgtagtctactgagaacgttgccagtttctcactcagatctgtaaaccaactcaagacatcctcctggtttatatcttttggccaatctttctacccgtcggcaaaaatcggattgctaccttcagtgcatctttcgaatatagcatcggatgctgcttgaagaccactgatatttccaaaaaattttgagcggaaatgcgggagccctacatagagacacccaagctctgacttgaggaccctgtcaacatcttggcagtattcagaggagttagcgaagctactcgttttttggagccagggggtttgttagagggaggaggcaatcgctcgagggggcggcgtagattccgttacggccacgtccacaagattccatatctcttcatctgttgaggtctccacaagagatgctttgaaaagtggtttgattcgatcaaggtcgaaatgacccgataggataagttgaagcagaccccgttgaagagttcctcccgacttggacagctgaagaccagcagcgggaagaccctcaaaggctgacacgagggcgaccgcgagagattgcataactgtatttaagttagccaaaataagattttgcgatgcagtgccgcaccctcctgtgtaagctgatcgacatcgtctccacagattgacttgaatctgttgcgaaagccatttaggccatccccaatagggttttcaatcatcacctgtgatcttttttgatcagacatggcatggtgctctttctgccaccaggttgactttgtggtgagagtaagagcggaataccacgtgatttagagagtggaacctaccccgatatagagcggttagacctggcacgtaacatatggcacaccatttaaagatattcacggagtagtaagtatctaaaacctatatattttaacaggggtgataaggacgctaaaaatttagtgtatagctgatatatctagaaaatgacacctaaatgacgtatattgtctaaatcaccgacgtattgttctgctattctccgaagtagctgaagattgagtgatctaaatttatactcggtgttatggctagaaggataacaattagctataaaaaagtgccaggaatatttgacggaatatctccaggagcgaagtataagtcatgtagaatgtctgcactatcacaatgaagtcattgcaaatactaactattccagttagtgtcctattgcataaatgattacctgccttgctagtgccgccgcatagagccttaaccgcatggggcgtcatctagatagatcgtctatctagccgcggcaccaaaacgggaccagtatatccgatctgtcgacacctacagccgctacgaagaattcgcgggctcaatgatcaatggtgcacctcgagaggctcacccagccaaacatcaaaagctacaccaaatccagggacaagaatagccgtgcgagagcacgcccaccggcatccagaccacgagcaagttgtacagcaagctggagcagagatgattcccagagaaaaattccgtcattgaaattgttaagaaaaaaccaggatgagggaaataacataaatcctcgtttttcaagacactccatgcaacaaccccaaatcctcccctcggagccaagatctggtttgattcgcaaccccgagacaccggacacacaagcccgatgtctattcctccattcacaaaaacatcaaagacgccatttttgagcccgtctgaaacattgctccacttgacgctaccgtagtcgagccgggtacgtagatggatttcgtggatgcgaacggttcgagaggggggagttggttttttttgctcgcttagcggtactgtaggttgagaagcttgtggttagtgttgtgcttttgcagtgtgcatgtgtggtggcagtgggggccgggaagattgtcgattatcgattggaatttcacgtcggagaatgtgattgtgtggtattcgaatgggatcggacgggattgtcgagagaggaattaaaacgaaccttggtgaaaccaatatcggtggacttctcacggaagcactgacggcagatgttcatctaaaacgatccgtattagccacacaagtccatgtcatgtcacatcttgcgatatgcaatatgctcgagggattgatatctccttacgccgtacttgcggatcagaccggcgcggtgggagcagacacggctgaaggcgcacaattattagcaagcccgttcgttttgtatcgatttttgattccatccaggattcctccaagtttcattctcggtgtcgactggatcgttcatcggggaattatagcagggtaaacacaccattcgcgggagcccttgccgtacctatcgagcggagagaaatcccatgttagcctcgtcgctctttttcgagatagtgcctagtgtgtgcgtggtgcggtttcgacttacttgcggggccggctgtaccaaacgctctcgtgagtcatcttgaggttttaaaggtgggacctgggagttgacggggttgttgacgggacgagggtcgctggcgttgggcgttaagaacagagacaggagttagggttggaatttgcgttgtgtgctgccccaatggggaatagggcacgggccaactcgcttgagttgcgctagctgtttttggtgtatcatgtgaccaatgggcgatcaccacatcttagcgcctcaggctgccagatcttatacttcacttttcaacattaatcttagctgacttttcttcaaagtgctattgatagatactttgactattattcgaaacttttcgagatacttgaattatgaagacaacgtgggctgctcttgtaaattcaatatactaggaattcataaggctatgtgcataaagccaccagtttgtactacagcgaaactgtattttcttttgaatctacgtacttcagaatgctggcatattaatagccgtaatatacagcaaaagtgacttccctgctcttgaaacagagcccttctgttgctttctctgtctgaagacctgtgggcatcttccccacaatcatggaacagttggcctagactagatatggtcaagaatgacctccacatgtcaattaggttatacgttttggaataaccaggataagtaggataatctcggggaagcaaatcagtgggtctatattgccatttagaagactgcagaaaaagtgtggtgattaacagaaagagatagcacataagcggctgcatattagcatagagagaagaatgtttgttcttgaggatgtgtgtaacctcgtgttgaggcacgtgtcctgtttgctagctatttaattagcctcagttgattccttcttctccttcttcttcttcttcttcttgccaacctggaagcttgtatattcctgaggtgaagtctcggcacttctacatccatatttcattctaatatattatatatataggttgatcttctttcctatcatccatcctcccattccaccccagctggtctcgatgaaaacttccaaccgacctcaacggcatgcaagttagccttgctgtttaaacgccgaagtcactcagaagcttggtgatctggttgactggttgactgggctattctcgagtgcattcacttcatgaaggaatcaaaagctgccgggtcttcccttcgacgtggccaggttatctagcctctggccatgttccgattatatattcccaggtggaaatgggaccctgccacttgtgcccatggccccatactgccctcccagacttgatctagcacttagctacatcggaaccatattctcctcatcaatcatgagtctgtcgatcaacccaccccttagctaccaggggtgaacgcgaaccttccgaaatgcaccaagcgagccaaagaaaagcaattcaatgtctatagaggccttttggcgatcatcgatttatatcggtccatggctaggatccctcatgccgtcctccaaggtccttccttcttgttctttcaaggtcctactcgtgtccccaaggtcctttcttcttgtcctttcaaggtcctgcttgtgccttcaaggtcctctgagtccgataaacgcgctcaactcatcacccagcacgataccacgctattcgacggcaggccttgttattcagccaaaactcaacacactttactgctcattggaaaccgcaagtccgtgcttcagagtccggaatccaagtgcttcgaaatcacgagccacaaattgaactcgacgatttcactctcaatttcaggggtcaaagatctcttacattgcgaatcattattttcagtgtgctgggatataatcagatcggagggcatatgttgatcagttcaggtcaagaaactcgaagactggtcttcatgcaaatcgcaacaaacccgagatgctgaaggtccatcacttttccggtccgcaaaacgacatggacatggaccatggaccctggtggtgtctatattttgaccatagctaagttgaggagatgttgatacccttcatccatacgatcatttaagtcaggttcgtggccagcagtatttctatcgcggccacgtggctcacttctggacgtcctcaaatatacgatcggcctcccttagagctctagagctcgacgtggccgttttacggctaccagataccgcagacgtttcccacctacgctgtcagctccgtcgggatttcactgggttacattataggacatcagtccttgcaacaggcaggggttcttcaccgagatgtctcaatcaatcatatcatgatcaatgaggatgaagagaatccatcgtgccctcgttcttaattggtcttgttttggtcatcagagagcaacgagatggtgtctcgggagtaactggaaagactgacacgagggccttcatggctgttggctcgcttctgggcgagaagcattcttttcattcttccgggtgttcgccacaatgcgattcagcggtggttggaatttctgagattggaccactccggctatggcacgttattgaccgtgaccgaatctctcagctgcccgtcgaccaggatatatatgtcgaatcagaccccctctgatatcatgcctgtgaattccggaaattgaagtccaagtctacagtaatacagcgtgatactagtatatgcgaaggaatcaagtggctatcgacgtatgagactgattaattgtgttgtaagcctaactgtgcacaaaggttctacttcttaaccttctcagcccgaagataacgggcgctgtaaaacaggagataggcgtcctggcggaggacttccgccacacctgcgatggtgactttattgtcatccatcaatacccactataaaggtaacccattagcacggacacagacgggacgagggtacagtggaacaaaccttgtcgtggtcaatacgagtgtatgcataataatgtccagagtccattgtcccttggtggacgatgaccgtagacaagtcgtagatgtaattcgacatgtcaacaggaaggttgtcctttttgaccgtgtatggcagcatgttcacagacaaagggaagtcgatatgaccattcattttttcggatgaattagaggagtgttcataacgctgtgggaaagtcagcataagatcttattccaagggagccagaactcaaacataccttcagctgcatgcaaagcataacggggagtttgcggattagcaggcgcttcgaagcccgctggggggtgttaccacacttttcgcagtggtaagcagcatcggcgtggaggtcttcggcggcagtgaagctatctaggcagccgaggagggttccagtagtggaagaagtagaccgaccgagcttgcgcttcttgtgttgaagctggacatcaagactcagatcggccatagggtcgtgggtgttagtggtttgaccgcatttgtggcacatgacgctgctgcgcagttcgccatagaacatctggtggaaaaagcactcgcatggcttatcgtagctatccacatgtccgggggtagatgagtgcagttcattgacaaggaattggaagtattcgtgggcgtcttgctggcgatatccgcgcatttcctgtaactagttagcaagttctgttgctcaactcggacctcgacgtaccttggatttctgccagccatgatgaagaagcacggctgcagagactgcatcgtttctctcggcgctgttaaactccatgaagacttcagctgttgcacaggcgagacagtccttgatcatgcatgtgtggacatcatggccacctcctaggaaataggcagtgagggtagggtcgtgcagcagggcctgcaagatagaagcttgatagcacgtttgacccatgttccagacaccacgagcgccgcggatggcgcatgggttcttgtaagcattgctcttgacgtagacctcggtggctgagtcttcggcccaaatggaccgcccatctaccatatattagtagatgtccgcgaataaaatattcttgaatcgcctaaatctcaccgagggtttcaaatttggcagaagggccacggagtctgtcgagggtgtggtcatagatgaaatcgacacacttctcacagaagacaaagcggttgcgagactcgatatctgccatgtataagtatgaaccaagttgaacagtaagaaaccattggcttacaaaatgcatgcccagtcgctgcagtatgctctgctcgtttggaactcaggcatacttctgtgcaactcaaacagtgatacttcggcttgagggaggccacagttcggaggccagtagttggaacagcaaccgtttctgtctttgaaaacggagctagcgatttgtacttcttgcagaactcctctctgaactggccagcagtcttctcgtccttggagagaatagctgcaagatgtactagcgggaggtcagatgggcacaaatgagtcacgacaattgccattcttaccacaaccatacgcagcttcagatagaagttggaccgaatcgagagtcgccatagtgagcgacatgagtatggttagacgggagagagaatgaaagagataaggtggaaaggagaaggttaggattgatcagaacacgacacaaagatatgcagtagaaacacgttaatagaagttccagacttctaccgacgtggagacaagaagaggaggttgaaagagaattcaagggagagaaaggctggttatagagagcaggtacagcctcaaggactcctgctgaatagggccagcattgcactgtataaacagacatcaacaatgtgatcaaacagagcgtaccagaacaatagaactcacgatagcaagtgaatagggacaatagtagacgaacagagggaagctatacagtccacaaagggttgcgtatgacctggttcgacgtcactaccaagttcgggataatacgaccctattcaacagcaatgaatgtaaatataaaagtctattatgcactgaatggggtcaagtttccctgaggatctcaaaagtagtggggaggttggtttgccatcgggcggtggtttttcgcctccgattgaccgataccgccggataagatcagatggcagaaggcagaagctgatcttggtctttttgtgtagggaagtatttagtgatttagtattcaagtacagagtatatagactgggttttaatgttgtacaacctccgggtgacatgatagttccattcaatggtcatttctaggtaatcataatgaatggcagatgcgccaacccactgcagtggaagctatagctaaaggtccagcccttggacgctaatagtcaaacatgcagcatgaataataaattgttcataatcaggtcattgcaggcattcaatatccgttaccgagtcccagtccctctgccccgaggcagtgcgctagcacgcccaccgcgcgcagtgcctcgtgtagtataccggctgcttgctgtaccacgagcagtgccacgcgacgttccccttaagcccgcagcatacttggacgtcggtctagaggaggaggtggtgctcgggggattctcgacaaaagttgtgtccgtagtcctgtagcgtgagaatcattagctcaagtgtcctcttgtagattggtcgcatcgccctctcgactcacataaaggtcatctcgccgtcatcaagcgctcgtgttcgttctgattccatctctggatggcctgttagcaaacccagtccagcgcacctaggtagttcccacagagagccctcgcaataccttttttctcttcttcatcctggttggcttttttgaacgagtccggaatcggagcctgtgtcgaatcagcaaccctctcgcgctcttaccactgccacaactgtcggcgacgggtctgcgaccatacctctgggaaatccacacagaatgcattcatattcaatccatagaggaaactggcaaaactctcactgaagcgcgtcaggctctcgtgcattagctgcaagtgcatgaagttggcctcgagatctgccatcgaatcggccagctcggcgaactgcggctccaaggcattgatggcaggttgtgtgtatcctgaatttccaatgctatttccatatccgtgtgcttctcgtagtgaagatcgcgagcttgggcgtagaggggttgtgggcctggatgagggtctcgggcgcgaggatgatcgaggtgcgtccatgtcttttgtatttgataatctgataggagtgctggcgagagatagtaggccaacaataaataactgggggttgttattgttaagagtgggttgttgtcagagcgatgtcggtgggttgtgtttgggattgttgatctccccggaaggaaatgtctcgcacgcgacaacttttatacttgcaatttggagatgaggactgtatttgtacaatgtagatgtattacatggacttgaacataagaatccatgcctctaattgattcctcgttctaccctacattacctataaggaaatgatcttccccgcatcgtcatattgttgattccgctcggcgctcttacaatttcttccctcccatctcccagtgctaagacctagtgctcactcataccaccataacacctcgatcatactgcttatgcgtggcacaatcctacgtcgtctctatccttcggccaagttccctgtcgcccggtattcattcgcgcgaccattttctacgcacccagaaccaagaaaggcttcatctttctggacccttacatttactctcgctgttgtcggaggaggcgcttggctccaggacagatacttcaatcccaaagacacaatcactccgcagccccagctgtctcaagaacccttcctcggagtaatcgatacgctcgcgacgatgcccgcccaactcgcccccggaacagttgggaacctcactccggagcaagaagtgaagctgcaagaattctgggtcctggcactcaaagtcttcggcctcacattcgaagaactcgaagcccccgtgtctgccgcccccagtgaagccccaacacccgccccagtccaggataagaagaagtccaagggccggtggggaatttggagccgcggcgacgacgatgagacgaaaagcgctcccagcagcggcgccggtaccagcatagcttcaatcagtctcgccgacggcgacgacaagtacggccagtccaaggagttcaagcaagcgctggaggacatgaagcccgaggagatccggacagcgttttggaacatggtgaagggcgacaacccggattcgctgctacttcggttcctgcgggcacgcaagtgggacatcaagaaggcgcttgttatgttgatttctacgatgcgctggcgactgctggaaatgcatgtcgacgacgatatcatgttcaacggcgaggcattggctttgaagatgtcgcagggctccgatcccattgagaagaagaagggtgaggacttcctgacgcagatacgtctcggtaagagtttcctgcacggtgttgaccggactggtcggccgatctgtgttgtccgcgtgcgcttgcatcgggctggtgatcaggagaatgaaggattggagcgctttactgtttatactatcgagactgcgcgtttgttgcttgcgccgccgatcgagactgcggtaagtattccggtgtgcggattttctctcgggagctgactcttcagactattatctttgatatgacggactttggtatggccaacatggtaagctttcgtctctacgtgcttgacactatactgatatctccaggactacgccccggtcaagttcatgatcaagtgcttcgaagccaactaccccgagtctctcggagcagtgctcatccacaaggccccttggatcttctcaagttcgtatcctagcaccatatataaaacccctttctaaccaaaccaggcatctggggcgttatcaagggctggctcgacccagtcgtcgcagcgaagattcacttcacgaagaaccgtcaggatctcgaacaatacatccacccaagccagatcttgaaagagctcgaaggcgacgaagactgggaatataaatacgtcgaggtgccggagaacgagaatcccaagatggccgacaaggaaacgcgagataccctggtggccgagcgccaaaagctcgccaaggagatccaggatgtcaccgttgagtggatcagcaccagcttcaaaaagaagaccgacgctgcctctgctgccaaggagaagcggaatagcttgatcgagcagctgcgtgcgcaatactgggttcttgacccgtatgtccgggctcgctcgctctatgacagactcaatatcgtccagggcggtgggaagattaacttctatcctggcttggagaagggagcagagacatcggcataagctacgcagtacatgagtcgcggtacatgagtcgcagtacatgagttagatagtgtcatgcttacctgctaactatagagttttgatttgcatgtgtgtagtatacacagacttggcttttgttaactagaggatatatgaacatttggtatacattcaacagcagagccctgggtaaatccaaccgggtcctacttcagaggccctacaactcttccttcagaagaacctatgtagttcacagcgatctaaatcagaggcgatccaaatagagataactcagtttcattgttcttgaattcattgtcaccaaaaccaaagccgtttacatcttcgactggatctcctcgtgaagagccttgagcttggccatatccgtctcctgtgtaggccaaccaatggacataccctccttctcgttaggcttgggaatctattatattgtcagtgtatattcaaaggcgatttctagcgtaggaccaaaaattcgaaagatagtagagcataccatgtggaagtggacctatgagagacgactggttagcacggcacaattattagaggaatccccaactgaaactcacatggtcaacgacctggtgcgcaatgcggccattgttctgcaggatattgaaatcctcggcgccgctggccttggcaatcttcttcgcgacgggctgtgggcgtacatcttggttagctatccctgttctccaatccaattccgggtctctagggaccttgcggggttgcccccaaggtccccgaagatatgtaatcgaatccgatcggaccgaagacatagactctcctcttcaccctcttcgttgtcctgggttgttctctcgacttaccaagatctcgagtaggtcctcgtcagggatatcggtcaactttgcgccgtggaacttgggaatgacaagctgcacatgctgtcagtttggacttttcttcttctcgaattatcgtgcttgaatcgctggagctatcatggcagttttggcaacttcgctccccgccataatgaacacgccggatgcggggaagaggggtaggaagtaatacgcaccgcatggccacggctcagcggctggatatcgaggaaagcgaagactttctcgctctcaaagagcttaaatgaagggatatcacctgtatagccccaaggaagcaggtcagtcaacgcatattctgctatgacgtgtcgactggacattgcgatagagtacggagtagctatagtgtgaaatggacatacccttgatgatcttgcagaatatacaggcagcggacgacattttgtaaagctttaaaattggaaggtcttgaatgatctcgaagtgaagctatgttgtaagcgttcaatttagaaaaaaaaaaaaagaatatgcggggttgcggaatgaatcgaccgacgaggatcgaactccgaccgttcccgtgtccagaccacagccaaacttagcaatgagggtattataaactaagtccacgaagcagattcgaggagtgggacaagttagtgcagaacccatttcttgccttttaccagagatggccgtgatttgcccacaaaactcctcttataaatctttggaaacacaatgacacagctgtcattttttttcttttgcttttgcttttgcttttgctttttaattatttccagcatacgtagaaaactttgatttgtatgtaactgggaaatactgctgtgcatactccgtaacgtcggtccgtgtagatagtgtatagggttgtatccttaagcagctattgacgacatgtatgttgttgctatgcagttatctatgttgtatagcttccattcctcctagttgcaatgctgtaaactgttatttctatgggttcgacttgatatctctagtttgtcctatatactccgtacaatgaatggcttctagagctaccttggcaggatatacatccttgaacagccctagttacttatacgtactagtgaataatgtccgaacatggatttaacatgaatagtagatagctaacaagagccaacccactagctataatttcattgtatatagaaaagtatccatggatacaacatcgattcttatagatatgaataaagcatggggaacatccaatcacagtccaggtgttgtcagaccaaaacggggattttctcctatagaggtcgtagatatactaactcatagctttcagtaaagataccaacttcaaatcaaatgaacaaccagaagctatcataccagccaagcccaagaataaaaaagaaagacgacaaggtgatttgttaaagtggtggtccgtactcccgaatcaggactagcgcaatagtcccgtgcggttcttcccacttgacgctgcgaaagaccgcacatcaccacgccctttggcaacactccgctccaattcgctggtctcgagagatatacccagccagagaccatgcagaagtctcgcactatcaacactgccctgggcgcccggccttttgtgccagttccgcgggtgcagccccagttccagcgcaaccttcaggatgtccgcatcacccggactggcaagcccgttataaaggtccaaggtggccggtaagcgatcaatgaagctgtggttaactctaatgtcctgcttactgacgcgctcttctataggtcttccattggaggtagctaagccgttccaattcgatgctacgctcgatcccgatgtgctcacgcaattctaggtcacaccgcgacggtctttggtgctactggtttcctcggtcgctacattgtcaacaagcttggtaggttgaggtctgatgcactgcaattggaccgtagactaatagtccgcagctcgccagggatgtaccgttgtcattccctaccgcgaggagatggcaaagcgacacttgaaggtcactggtgatcttggcagagttgtgttcatggtatggagccgtattacgcatatttgttgaatgtggagtgtctgaccctgtataggaatacgacctgcgcaacacacagtccattgaggagagtgttcgtcactccgatgttgtctacaaccttgtcggtcgccaatatcccaccaagtgagttatgtgtggtatacatgaatgaatactttctgacgacccaggaacttctcatacgaggatgtccacgtcgatggtgtcgagcgtattgccgatgctgttgccaagtacgatgtcgaccgtttcatccacgtttcctcctacaacgctcgccgtgactcgccttccgagttctttgccaccaaggtcagcatatccactggaatacaagagcgagagtgctgataatgtatagggatggggtgaggagattgtccgcaagatctaccccgagaccacaatcgtgcgacctgcaccaatgttcggtttcgaggacaacctgctccacagactggccaagatgggcaatgtcttgaccgccaaccacatgaacgagcgctactggcctgtccacgtaagttattctcccggctggacaagctattgaactaaccctctaggccattgatgtcggttccgctttggaggctatgctgcatgatgacagcaccgccggccaaaccttcgagttgtacggccccaagaactactccaccgccgaaatcgcccagttggtcgaccgtgaaatcatcaagaagcgccgtcacatcaacgtccccaaggctctcctcaagcccttcgcgcactacgccaacaagttcctgtggtggcacaccctgtccgccgacgaggtggagcgcgagttcattgaccaggtgattgacccgaccgccaagaccttcaaggacctcggtatgaacgagaccgccgatctggccaacttgaccttccactacctgcaggcctaccgtagtgcctcttactacgatctgcctccttctacggagcgtgagcgccgggaggacaagcggtacgtgcatgtgctggacgaccagtagtttgtgtttttaatgtgtaaataagccttcctagacccaagttgatttcctttgttggatgagtgcatagtacaagtagactcgtagagaagcttaagtagagatgatcactcgccaatatcaaaaacccaattccccagaactccccgcacccgcacccgataacatcatattctacctccaaaccttacctacgtcttaccttcttcaccttcagcctcatactcatactcactccaaaccaaacccacaatgcctccaacacccatcctcctcctaaaaacaaaatcctccccccaagatggctacgaagagttcttctccgcacaaaactacaccccaaccttcatcccagtcctagaacatcgcttccacaaagacaacctcagccaagtccgcgaccgattcaccagcggcgaattccacaccgaagccccaacccctcgaaaatatggcggtctaatcttcaccagccagcgcgcagtagagggattcgcgcagatgatcgaagacgaacaagacggtacataccacacacaacccaatccaaccagactccaacacactaacaccaacaaatccagtccaattcaacaccccatcttccccactaaccctctacaccgtcggtccagccacagcgcgcaccctcacaaccctccgcgacaaacacctcccacacgccagcatccacggtgccgaaaccggaacgggcgagaacctcgcgcgcttcatcctcgagcactacgacgccctgcacccgacgcacaagccctcgctcctattcctggtcggcgaagtgcgcagggatatcatcccgaagacgctgatggatgaggcgttgccggtgcagaagcgcgttggggttgaggaggttgttgtgtatgagacgggcgtgatggggtcttttgagggggatttcgcggatgtggtgcgcaggtcggcggatggggcggtttgggtggttgttttttcgccgacggggtgtgaggctatgcttagggttcttgggttggggccttttgctgggaatggaacggggaatgggaatggacaggtgtttgttgctactattgggccgacgacgcgggatcatctgcgtaaggagtttgggtttgaggcgcatgtttgtgcgccgaggcctagtcctgagggggtgcttgaggggattgagaagtttatgagtgggatttgagggatggggatctgtataactatgtattctgtgtataactagatgtaaaatggaactataagtatataaacttgggaataggactagcagagatacagcaggtagcgttacggagtcagctattttacttaaatactcataatcacatttcgagttgcctgctatctctaacatgtatcaaatcacgctgtcaagtcaaattgcgtgcagaatagaatccagtatcctccctcaacttaatatcatttggaaacagtcaagtcgatttaccgcatgatttcctcatagatcaagactgggagaggttagtaaatatggaagagaagaggaaccagagacaaataacttacgcttcaactgctccttactcagagcatccttgttcttgtcgaaatcgaagaatccatcaggaatgggcggtgcggtgggctcgtcttcgggatcatggtatggctcaagataggggtgcttcagggcttcctcaacggtgatacgcttagccgggttgaaagcgagcagcttctcgagcagatccagagccgtgtcgttgctcttggggaagagtgcgcggaaggggatcttcttcttaaaggggagggagcggatgtattcgcgggcgcggcgggatttaatgccgtagtaatcttccattgtgggtgtgccgaggacatccaggatgagggtcaactggtggtgatctaagtgtatgttagttctgttactcttgaagggaaagtggaatcgtacaatccttgccagggaagagaggctttccgcttagcatctcagccaatatgcagccgacactccacacgtcaatagccttggtgtattctttgaatgtcaacatgatctccggtgcgcggtaccaacgtgtggccacatattcagtcatgaatccagaattatcatcagtggaagcggccgagcgagccagaccgaagtcgcagactttcaggtcgcagttggcattgagcagaagatttgagggcttcaagtctcggtggaggacgttggctgagtgcattgccttaagcgcacgcagggtctggtagataaagtactggcagtgatcatctgagagatcttgtgtgcggataacccgatgcatgtctgtttccatcagctcctgcatgctgttagtgaaccatatttcatgcatgcacatctcagacagcttcaacgtacttgaatgagataaacttcattgaatccctcgtagttacggggccgttgaatatctaggatggagataatgttctcgtggttaaagtagcgcaacaacttcatctcgcgcagtgtacgcaagcagaacatagaatgatcgaatggcgtgatcttcttgatggcgactttctggccggagggcttatgaatggcagagctgtacgaggttagaagagcattgagaagaaatcacgtctacttaccagacgacaccgtaggcgccttcgccgataacatcttggatttcatattgatcggagacattgaaggagatcttccgggatcctcccacgggagggttctgctgacccatggcgagaatggtttctctaatagattcagccttggggtgattgtcagctttgaacatccttgggatccagtggaaaaaaggccgaacacagtccatggttaatgaatgagagccggggattgaaaacagtagatggggatggcgcacaagttggcgattcacagtccagggaatgaaaacaatagcagaggtcaatcgctcaaaggcaagcaactcgaccgcagtaacgcgagggaacaaacgcaacaaacgcaacgacaaagcagggaaaccgggatatgaagcttactttcgtttgcgctgtaatcgaattggtttgaaaaaccgtccaagctactgcctggattggatttcaagggtcggcgagactcaggggataaaggcgaggtgtagaagagaggaactcggtcgtacgaagctccgagcggggaagatgtgacaggtacggagtacagcgtctagacccacgagaccgggggggggggatacgaagagcacaggtgtaggtgtcaggtcggatcaggtatcaagctcagagtctaagaacgtggcatgtcagtgggattgacggtgatgatgctggagcgcatggagatgagccaagccgctcggaagcggggtcattctctcatgcgggatcacaacgggtctggactgcgactcaccttgggtcgccttttctctacgaaggcaaagggagatagagaagaaaggagagaaggatgaggataggtgaacctggagaaacagcgggccgtaggggaagtggtggggcagagagctttaaggcggctccggtagatgaaacaaagtggttcaggatcagaacacgggaattggggtcaattaagaaggaaaccgtgagagggagcccgggtgagcgacgatcccagagcgagcggagtgaagacgaggaggtcgaggaagagaagaagaagttggtctgtcgctgttttccccctggcgctttcgctgggttgatggccgtggaaccttggatcaccatcaaagtgtctccaccagtacctgggggtacttaatttatctacaagggacccatacattgacaagtatcccccatgtacatcccaccacagcgatcctcagatctccgccacggcgccaaagtctctcgcctgtcacgctcgttggccgctggacggcgctactgcaccggacgaaacttgtcacaatcaccttttcccgctccaccaacataggaggtgctggtttcatcctgattggagaatccaccactcctagtttcactagtcacaggggggtcctgttaattgggtctgagacactgaatctcaggtaaaacaagtatacggagtaggtcatgcgcatatggtgaggtcaatggactccgattgtaggccgtgtgattctcctcatcaggcctttcatgaggttacttatttgtttcagggcttacgcttgagcatggcgctaaaatatacactcaaaatagaaatgtggatgtggattctactaatggtctgatatatatagaccatcactatgttcgggtcaaagcttacttctagaaataaacttgcaagttggattgataacggtagcagcggcctaggtttaattggagtgaggagaacatgatagcttgcaacagaagacaatataaatatgggcctaatcatggttgatgctccatcagactgtagttactctacatacgatgggagatccaccatcgcctgctccagcgtctcaaaatcagcgaacgaaacattgtatcggagatgtcgcttgagcagttcatgggcgatgaaacgctccggcatgttcccctgtgcatccaggaaagagacccggggattggtattgctgattatctgcagctcgttcgcaagacgatggtgatttggacactgctctgcacctactaggaagatcgtgacatacacccaggacagaccaagaagatcgagctggaattcgttcatgtctggtgcttcaccgtcgaggacgataagcagtcgcagtatgggtgtttgtggaccggcttgccatccgtacataggatagtaaattgctgtccgagagtgcttttggaaatggagttccttggctctttgccagcctagcatcagtcgagtctcccctccaaatctaatgtttggccatatttgttcgaaattctggtggttgatgtggcccatgtagcgggcctgatccgcgaatgtgacgagctggtagcctcagctatcatggtcgtgattgatcattgcttgggaaaagcgacgtacgatggcctgggcaacatctatttattgaacttagtatctgatatagactggtcggagggtgatatcacctttgctcttgggctgcttagaggcggaataacctgtaatgagatgctcattatgattcgggcgaagcggtgcagagttcatagattcagagacctctaacaggatcatagtctcgtctagaggagctgccggctcccgtaagggtctgaaaggagtcataacctgcttcgagtaagtctcggagatggattgagccttgcagatatcatcgcgagagaagtattccgcaggtgttccaattgcggattccatcctatatcgagccatgttcatcgcagagatgacatcaggcttcatcttgtttccaacaatgccctctgtgttattcatgacccagtatagacgttcctcggcgagatctttgtatcctctccaaccgggagtgactcctctccacccaccaactgcgtcaatgctcaatctgagcgggttggacgtggatttcgcccaatcctctgggataggctcgaaatatcctgcgcggaggaggtggagatactgaattgggcatcgggctcgaagatcggcgatcttttgacttgtcccggctgtttcttggtacgctatcacgagctgtcgccattcttgatttggccacctgccttgctcctcctctaggatggccatgcgtagctctctggtgtgactagctgctttctctgccttctcctctggcgtcttcttggataacatcttcttcaaactgccaaatgccgatggcttggagctctctatggggggattttctgctggctgctgggtattaggagaagctgtggtgtcagcctcattcggcacagaggtctctgggtcttcgctatcccatatggtagatgctggctctttggaatcaatgacagcctgtgccgcagcattgagggttgcattcaactgtaccatcctttgaagatgctggctgtagccggacggagtaggtttcgccttgttgtaagtcccgggagttgtaaccggaaaaggcgagggcacacggctatatggatttttcatgatgagagccgacgaatgactatcatgataggctgattcacctggtcgagaaagaaagtgagaccacaacgcaacttatatcgtcaaattggcaaagctgacctggatagatgactgctttggaccatatttcctgaataggaaggcgggcagcctttctgtctttgtatttgtggacatcgcaattacaattataaaactgtgtggtatgctctggttcaatatccttattgaaaatgcgacaggcctgctggatgccgtgtagggcggccttcatatcttgctatcagagcagacaaatgttagcactttatcaagacgaaagtattctatatcgtacttcatctttagagcggacctcggcagcttcaataaatttattggtgtgatggtgtgcaagctctcttatcactgaacgtgcatacggtggggggcagttccgtatatcaacctcggcatctatagtaggcaaacttggagttatagcttcattttgagcctcataataccgactaatagcatcatcaatggtttccgcgccctggaatagatgtgttagtgtaggaaaaaaggaaagtgattgaatgtcttacctccaagaatctgagggccgtcccttcattagcctctggagcgatggaaatgaacttcgctatgtcatctctcgaaggtaacatggtgagaagtactgaaagaggtaaactaggggtgaaatgtcaaatggggggtcgccagataggaaagtgcagggatataatctcgttactaccccggtgcgttagtgcactagactactacccaagcatcactaaacctgaattgggggcgtgaatgggaccgagcactctcttttcaacaattagaccatttgattcgattggactggatcaatttgctaaaaaccatctgaggtgccatccctcccatggatattctcatgattgcttcgcttcgctccgcaataaaatagtggaaaaatgataccgttaattcttcatagatgcgatcagcgtctatcgcctgtcaactataactcagcgatctactagtactagataatccaaacatgcccgccgtgatagaaagccaaacgcaatcttcccaacgtaatggtacaggcgggagagctcgcgaaaacacgaatttcatggtcaaccgagaccggccggtcagctccacattactgcacgacctgcgagcaaatcgtcagtgctgaccgatactatggccagagcagagggctcaaaccttctcttgcaaggaacccatccactgatccaagctgacgctttggtcggcacggtcctccaccagcatcgtctgagcccagagacgcagaccgggttcaccatcttcgcgaacgacgtacaggtgaggcacgataatgctgcccacacccttggcccggtggtcccgactcttctcaaccacggcccgcacacgctggttgaactcgttctcgacgtcggggagggtttgcttgcccacccgcaactgcgacttgtcagggacgccaaagacatcctcgatgagctgcgaaacagcatcgcggccaacccagaggaactgggtctggccatcgtcgatgaggtacaggccgtaaggcacgaggcgagccgaagacaagttgacagcagggggtaagaggatttcgccggtctgtggatcaggcacacccgcattgtcgggcatgtcatggagtgagtacattctcgggtagatatattggatgaggagcggcaggggtaaggtcgagagaaggcagagagctgcggaccgcatgtccgtgggaatctgggcggatttgcgaagaccaagctaaatactcgattagtatagaacagctatcacaaccaaagataaaactcacgttcttgatcattgcaaggaataggacaggcaaggctcgcaagttggcagggaactggaggccaccgccgctaacgctaccacctgcgagctccttgcggtaggtctgcagaagctctacgatcttagcctgaagagcctcacgagcgggctcgagaccgctgctcaatgtgcgctcgacagccttgtggctgaagaatgtggcaatggcctgctggtcagccgaggcgaagacgtctgccaggttctgggtcgttggaagcgccagggtcaagacacggatacgacgttcaccgttgcaggtagtgtggaggacagccgcctgcatgcagacgaccggctttgtaactgtctcatcaatggccacctcgaccacgtaggcctggtcacgagggaaggccgggaaagcacagagatcggaactacggttaaagaagttgccgtaaaaggtgctcatacgcagaccggttgttgcgcgcacgcggaggacggcctccagaccaatctccgaagagaggtagtcagagaactcacgggcgaacttcatggcatcttcacttcgtgcagcgttccagccagggtagaagtaggtttgaccaccagtgtagcggggcaagcagctcaacgaggccacatcttggtattgcgatgagaagaggaacatatccacggagacttgtgattttgaacattcaactgcaaagctcttgtagaaagagtttgcggtttgaagcagactcgattccttgctggtgcccagcaccttcttgtcttctctcatagtgagcgctccgtgaccagtgttaggcaaagatgagctcagaacagtcatctttccaccaacgggggagatcaacatgtaaccagctcgcaatgccgcacccatggcgcagctgttgttttgggtgttctggaacatttcttgcagcttgcggaggaatatctcaatgttctcccggcattcgctcagcgtcaccaggagatcaccagggatgggaaggaaaggctcgtccagatcactgacaaccaacatccggggctccgaagactcggaatcgtctcgaggaatgctgaagtagtgcaagcttgagtccactgcaataaaaccgaggcgagtacgccgatctgcgttcgggatacgatcgaggctctcttggatggtgcgagcggtagtggccaaaagaccgttggtcaccgatgcataacttacatcgatcaagaagaggtaaaccagcggttgaggtggtcggaccatgtattcctgcggcgcaacgaattcgaccatgctgtggttgagatcggcacggagctcacggtcggcgggcttttgcagtgtagcatcccaatcgaaggcttgtggcacgtcgttcgtcaggttgcacatgttacaacgccagcggtggccatggtcgaggaaggtaacgaaggggttgatataagagcgacaacgtcggcatcgtgagatgacttggtctggaatcacagggatagggtcctcggcgtcgtgaagagaagcatacggttgaatgacaagggcgaagggcaactttgatttcttcaggagtgagttggttgtggggacagcgttgagcgtagatcgcatatatttcgtagggcaattggcttccgacgggtaaacactggtctgtcgattgtaagcatatcaaccatatgcgcaacatggcatctatacgtactcccgggggtaaaataattggaggagggggatagtccagctcagcgacgttgaaaggttgggatcgaagatccgtggggtaaagctggttgagctggacttgaggtcgcataggggcttgggccacgggctgcgggggcggcatgtgatgaggctcgctcatgcccattccgccgaattgctgggtcatctgcgagacatctgcggaaacaggtgcgccgtatgctgcgggctgcatcatgttggggtccgcaccgtaggcgggttgttgataccctacaacttggggctgtggaggataggccccgtaagcacccccagccgtgggttgtccacctagcgcggcattggcgccagaaccgaaatcaaatgcctcaccagcgtacgctctcttcttctttccgcctgcagctggtgcgggtgcgccttgcccatataccggggattgtgtgggttctggagtgccgtaggcgggctgggcatagccttcctgaggggggaatcccccttgtggtgctgccattagagtcgagtagattgtgtttagtcgcacttaacggttgggaggaaaagagggttgcgcttgtcacgaagtcggcgggtggaatcgatgtgaggagacgggtggtaacagctcctggaaccccacaatcagtttctcgtcaacggaacagggtgaacctggttgcgtacggggtagctgtacctttagaaagcccagaagtatcacaaaaggcagtagcgaggcaaaagacagctcaccagaagaaaccaagggagtgtgggagaggcggtgatgatggtctacggtggcctttaggtcgtggcgctccagccaatcagagttcagagaacatgtgacgagaggtgtttttatactgtacgacaacatttgatatcgagtacgagaccatttagatatcaatgctgggatatttgcatatgcagatatatatgtactatttactgtcgtcgagctgacctatatatgtttctaagtatctgggctggtcagactgaacacctaatccctggtccaagcgtagagcacatccacagattctcctgtactgtcaattatgataatgagactacgcgatttgcaagctgattactttgctaaatttgtaccggacaattagatatccccattgtggtgctcgagtcttaagaatgtactagtatgtaagatgtgttgtcgaaagaggcggttgccctgccaacactaaccacatcggctgctgcacacgagaactcctccacacgttccacaaccttcagttctgcatacaccgagtagttagttttgtttctttgtttttagggggaggaccttattgttcttgattattgtctttttttggctttacatttcgttctagccattccttcagtttgttttgattggattgcatcgcatccctgacgaccaggacccagaccatcacacgacaattgaatgaacaccccgccacaatgagtgtccgagttgtcgcgcgtatccgtccccttctcaagtccgaacgggaggccgatgtgatcgttcgtacaggatcttccgccatcaccgataaatcacgccagtcaatcaatggcgacaagagtgacaagagtgacaagaaattggcagcattgagggacagagataatgtggttcgaattccgaaccccaagaatgagggggaggagtatgcgttccagttcaatggcgtgtacggcgcagaggtatcgcagcaggagctgttcgatgctgagggtaagttcttgttttaagctcatctggtctgcgatgggtcagtatattgatccggttcacagtgtccccaacaattaagcatcttctcaacggattcgacgtgacccttttcgcatacggtgtcaccggaacaggcaaaacacacacaatgcggggcgggaaaacactggctgaccggggtgtaatcccgcggctgctcagtggaatctaccgacgtagccggaagattgaaaaggacagcgagggagagacgacagtccaggtcgccctgagttattatgaaatctacaatgacaaggtgtacgacttgtttgagccgcccgagaagcgcacaatgtcaggtcttcccctgcgagataatggtggcaagactgtggtttgcgggctgagcgagaagccgtgtaccactttgaaggagtttgagcagctttatgaccaggctaacactaaccgttccacctccgcgacaaaggtatgataccacgccgaaagctagggcccatattctctcgctaaacatacaacatagctcaacgcccattcatctcgatctcacgccgttctcggtgtgaaggtcaccatctcctctcctgacaaggttcgcgtcagcactgcttccgctattgatctcgcgggatccgaagacaatagacggacggaaaatgacaaagagcgcatggtggaatcggccagcatcaacaagagtcttttcgttctggcacagtgtgtcgaggctatcaacaagaagcagcaccgcatcccgtaccgcgagtccaagatgacaagaattttgtccttgggacagaacaatggattgacagtgatgattctcaaccttgcgcctgtccggtcttaccaccttgacacaattagctctctaaacgtcgccaatcgcacacggaagatcgaggtccgagaggtcgaaaatgatcccatgttcaagggtccggcccggccatctattcggccatctatgggtacgcggcaacctctacgtgcactgactgcttctgtgaatgtaaatatgccggcgcctgctgcgaaggacaccgcagaaaaggaagagggcaaacccgttaaggcattcagcgtatactcggacaagccccaacccaagcttatcagccagatccgaaaactggaagcaccgaaacgcacctcaatctccaatgccccctccggccttccgtcattgaagcccgcccgtcagcccctgggtgtgcaacccaccgcgcgtcatgatgacttctcggctgctaggattgaggagatggttgagaggaaggttgaggagatcttagctgtgcgggctgtgagcgaacaatcacggcagacgcaagtccatgagcttaatgagcagcttcaaaagcgattggagcagttggagcagcgcattgatggcacagaagatgcacgggctgagggtctgtcatacctgctgatggctaaacaacatcaggcacatggtgaagacgggtcagccctgagaatgtaccagctggcagctcctcacttccctcacaacgagaagctggcagccaagattgctgccttgcaggaacgggttcatgcaaaggcttgggaagagaaacccgattccccgcccaaggggaggctgggtagcatgctctcccttaagaaggacgtaacacaaaccctcggcaaacgccaagcagagactcatgaggatagctatatagaccagactcatgccggtttttcgagtggcgaggatgttcttcgccaaaaacataagaagcgtgctgcagccaagctcggccaggtcgaggaagcccccgaactccttgacagtgaggacccatccctctctccccgaactaagcatattctttccatcatcaactcgcgggacgtgagccggatcagattgctcaagggagtgggtgccaaaaaggcagaggctcttgttgattgcctctgcgagatggaccagcctacagtggatacaaccgacagcggagtcgtctcagaccagccccaattccaggtcaccagcctggcacaactgagccagctgaaaggcgttggggtcaagacggttcagaacatgagacaaggggtattggcttaattaattgttgcatcttttggcggcatataccggagcataacggtgtttctctcttcttttttttcatgcatcatcattcagcgacggtgctatggcgtttcctgtctatacttttgttgaatgttttgttctatcttctgaatccaccttaggtgctttagagacatcctcatcgcgttcttttgtcataaccctttcattatacttgatccaagatcctttccaatgtttccttggttgctgactagaagatatgaccacctcggtggacttatcttcaatacaatatcctctctaacattcctaatctttcatcctcgtggtcttggtataacccctcggtttaccccggcacactgcttcttaggacctgaccccaaactagcagccccatgagcaatccctcctatgacacgaacatagagcgacaacgcaacttgagtctgcccggggccgtgactccttgctcaagaccgtcccatatatccgaaggcccaaagccgacatacacggcgctgatagtgatgtggaggtactcagtgttctcgaggagtatgtcatatttcgttaactcttgtcctcaataaaggggagattatctattaaacatggagaattataaaagatcaaaacccgaaaaaaagtctagtctaataagacccaaaggccgcatagttataccttgttaagtttgaatccaccaacagcgcccctggcgaaaacaaagaaaaccgacccgacaatcatgacaacaccacagaatatctgtagcttggtataactgccatggagaacatccggcaccaaagcacctccaataggagtacctgtcaaggccgcaaacgagatgacagcaaagaaagtgccgttgcgcacgcccacttggcgaagatcggatatctgcgccacaagagccggtgcgagcgagacgaatgcaccagagccgaagccatatagagcgctgaacacaattgccggggcattgcctcttgacggtagccagagggccaggacgatgatggcggagaagaacgttgttatcaccatcatgttgtagcggccaactttgtcggcgtaatagcccgggagtgtgcggccgaggatactatttggattgtgttagttcatgaacgaggtgaagtgtatgaactagacagggagagaacttacctagcagcattcaaaatcggaatcagatacccggacagatcgccagacatgccatatcgctcggcctgggtaatcacaaaagtgaagggcaagaacatgccccagaagaagaaaaaggcaccagcaagcgtaagcgcgaacttgatctccgccaacggtctcaggaaaagcttgatatggaatggctttgggtgatgcggtaatctcgatttgagcgtgagattggcgatacccaacatgaacaaaatgaggaaggcgcagattctcatcgcccaggggaacccgactttgggaatcagttggctgaccatgatagggaagatgactccgcccagactcgatccagaggctgttacgccgagggcgaaaccacggcgcttagcgaaccaggtgctgacggagttgacggaggcgttgaagatggcgctcgcgccgattgggctgcagattccttgtgcgaggatgaattggtagtactctgttgagagggaagccatcatcaggccgaagacgtggaggaatgtaccgaggagaaggacccagcgcggaccgtagctgtcgaacatagttccgaagattgggccctaagaggatattaggatgggtcttcataaagctgactctgggggatgggatacgcacgcagaagaacatcatgaaggtctctagcgatgtgatccatgttactgtgctggtagagaactcgctcagttggtggctttgatagtatgtttggaagactccgatgcctggatgatatcagtatcccgttgggtccatgtattctgacagtacttacaattgatccagccgaagctgacgaatagtccacagaaagctcctaatacaaccagccatgcctgcgcacctccatctggtgggggaccgatcgccggtgcggagggtgctggaccagcagcgactgacttctcgacaggttgcgcttcttttttttccgatgggagtcctttctccgggtcattatttccatgcacactcacggcgggtgtggtggtggtactgtcgatagagggagccatcccagtctgcttgttggccatctttgttgacatagaggaagtttcgagtagactggaactgtaatctgctttgaggtattagatattgcattttgaaagaagacccccaatttatagaccccaaacgaagacgggaagtataaaattaagaaacaagattgtgcgttggacaagatcgattcgaaactcacctcaacgtcggcccaggcgtttggtctcaagcttcaggactcttgcagattacaatattccgagcttctggttccgtttcagtttcaaagatgctaagtcggccttcatttgggatatttaaaggagaaaagacctgcaaaaaaaaatgcaaagggacttcggtcaatcggtcaatcggtttctagctaagtccgagctgcttaattatgcttttcatactccgtactagtccagggaaagccctccagggaaaagcatcgttgcttcactgcgattggccaatatctcacagaacccggggtctggatcctcactggccctggaaggctgcagtggtcggacatgtctgcgatggcccgaagtccgaggcggatttagctagctcttcgggatattactcgtttgggcaatgaatgtcattcgagttcaaaacatatgaaacatatcattttggttagatgcagctgaaacagcataatctctgatattcattggctgttacagtcattttgaccaaaattgttcgaccttgtaccttttgtagggtctgtctgggaaaaggcgcacttttatatgtatgagtacgacgtcaaggtcaatgtaatagccagttagtagttatcactatggatcggattttggctattggatttggttgataggcatcgcatttgagagatacagcgccttccactctgaactatatagtttcgaaagtatgtacaaagtgagtccatactatagttactcaaagggagctgtgttgtacaacccccacccaacgtcacattataatattctacagctatcaatttctagtttcccaaattattgtcaccacgatggcccaagtcaacactctggctgtgagccttcaccaactggccaaaatgatcgaccactccctccttcacccaacagtgacagacggggacgtcatcgccggcctcagagttgccaaggaatacaatgtcgcgacagcttgtgtgaagccttaccatatccaactagccaagcaagagctccaagacacagacgtggagatatgtgctgtcatcggcttcccgcacggtaacagcaccacggaaatcaaggtgcaggaagccactgccgcagtcgaagccggtagtcatgagattgacatggtcgttaacatcggcaaagtcctcggtggtgactggggatatgtctcccaggaaatcgagcagatcaacaccgcagtcgtgcaaaagggcgctatcctcaaggtcattttcgaaaccgattacctcaagcctgagcatattgtacatctttgtaagatctgcaccgagtcaagtgttgcttttgtcaagacttctaccgggtacggcttcgtcaagcaggctgatggttcctacaactacaagggggcgactgtgaagcatctcaggttaatgcgtcagtattccggccccgatgttcaaattaaagctgctgggggtgtgaggactcttgatgatttgcttcatgtcatgagtcttggcgtgactcgaattggggctactgccactgttgcgatcatcgaggatgcaaagaaacgggggatcggtatggatcggatcgaagttgaattcaagccaatgaaggaggatagtcaccgatagtgaaaggtgaatattgaaccttttacttagcggtttatttccggcagaaaatatattacagacaccgtactaaaagcaaagtacccaagttcacctgaatggctccaatccaatgtacagatacaacatgcttacagtacacaatagagcggtgtcgaaagcggtcaaaaatagaggtactaactcaggtactcaggatcaatatcactcgggggttgaaccctggtagctacctaggtataccgcttcgtatgaagaatattccagcttcctgtccctcttcaatagccttatgtggcatctttctcatacgattttctggagccatgtcttattgcattctttctactcgaaggtagcgaggattcgtatgttgtatatcagaagcaagaaaaagagatttgtcggcaattgccaagataaaagaaatgcccatactgtacaggatgtaacgtgataatcatcccaaatggagaccgctctagccctagcccgtacaaaacccaatgcgaagagaactcctccaagtcgaccctttcaagcgagtctttctatttagtttgtgcgagaaacttcgtcgaatttgaccttcccatctttgcgaatctctgcaacgcttcggcgcgtcccttcgatgtcattctctagttcctggacagagcgcgtcaggccagggacattgctgacggccttttcggcttctgtcctttcgtctactggcttttcctctatttccttcccgctttcggtggaccgaggagcggatgtactaggggacaaggtgaagccactagggacattggcaatctcattaacttcctgcgcggacaaaacgtcgttgaggcgaggaccacgggattggatgaggacggttgtgggaccatcaaactgcaggaagagctagacgacattgttagttggcaaagaatgaaggaccaaaatggggtgccatactctatctccccagatggtcattcgagaccaagtacgcagcttgtggaaccactgcatagcaattttgtatgccttggaatcagacacgtcacgaacgaacttggcattctgtagaagtcttggtagcgtcttcagacccggaacctggaagttgagagtggtggatttgaaacggtaggggcgaggaggattggaggccatggtgtaagcgaccacattgctgtcgatcagatattagcgacgtcagtgcaatcgcggcgagggtcatacctgggatgcgcaatgtattgctctccatccttcaattcgacagagtatagctgtccgtttccgaccaacgctattaaacctctgccggtcacctcggagctaccccaatgagacaagctctgcgcaaattagcttgatgtttccccacggaatcgtagttccactcactaggtttgcgttgatagtaggcttgatggtcagagaccggcccgtccatgcaagcaaagcccgtctttgggcaaccatccagtcaacggaaccattgacgttgacaacggcgaatgaggtattgggcgatcgaacggagacaagagctgtgacaggacttggcgaggagatctaggaaactgtcaatcgctgtcttcaaatccgcatctgcatcgcgcatcttaccttctgataaagaaatggcactccgacgatagccctccggaagggttctagaacgctcaatgtggaaatcacctgcgcggattatgcgttagtatcaccattccttcgtgacaacatcatgacgggatcgtgtacattatccgcctttccgctcaatccaaccagcgttcctcgtcgtgtgtataggttctgcgaggccgagagcgaaaccgaaagaagcgagtatggagcgccgacaacatcgaagcgcgcatctatgtgccctcatggtcagtgccataataatatgtcccggggcaattgcaattacctcgtgattcaacagagctgggcgtgctagcgagtggcagattatcgccactaaccgaaggcactcccgagggcgcggcgcgaatctgaacgcatcgcgtttgccggtgaacgcgaggaacgactcgagtccaggatagagggcgaacaccttggagggggcgcatggtgtttgaaaaaagagcaaagactaccgaagggagaatttacgtcagttgtgacgaaagggaaatcgggaaatcgtgggcccgagagccatgcggcctacgaagtacacaactgcccctctgaattgcgacatttggaagctttattataagaagtctttgaattaccctcattctccctttacatcttacttctgcttgactatttgcgaccatcccggagtcgaatcgagagcgacggtttttactccgaagccggcgatttccccccacgagctatccggagacatagctaccttgcgcgccaatctttcttacttattccgaagctcctctcggtggtctgaactactcaggagcttagagaatattattcctagcggccatgctgctcagagccgcacgatcgccgtgctggcgcacagcacaattcacctatccgagcttcgccggcaagccacgaagcacacgactcaatggaacacacctgcgcgcattcacatcaaataagagttcattatggagtcaatccacagacacagacaagaaagatcacgcatctgtcaaagctactcctacctctactcccgcctcatcacaactagcagacgccaatatcatccagaagccggaaggtagcggcaatgcgaagaccccaccgaagaaggacttgctgagcgagccaatggctggaaagaaagaacaaagaaaggctgactgggctattatgaaagaaatggccaagtatctgtggccaaaggtaagcctcgagtgcaattggtatggagtaacagggtattaactatagctggtaggatgattggggcacgaagctccgtgtcggcacagcactttcactgcttattggtgcaaaggcaagtttcgtctgttattgtgttttcgttaaaatatgcttatatgaatccaatagatcctcaatgtggaaatccccttctacttcaagaacattgtcgactccatgaatatagactttgctaccatcggtggaactgcctataccgtggctgggtcaatgattattgcatgtaaggataacagcatatcgaagagagacttgtcgctaatatgtcttagacggtgtgacccgaatcggagctacattgtttcaagagctccgtaatgcggtctttgctagcgttgcgcaaaaggcaattcggaaggtggcgtcaaatgtttttgaacatctgttgcgactggatctcaacttccacctgtctcggcagaccggaggtctgactcgtgcaattgaccgcggtactaagggcatcagcttcctccttacctccatggttttccacgtagtaccaacagcacttgagatttcccttgtctgcggtatcttggtatgatttggaacctatatttacgtttctatcttactaacgcgttgtagacttatcaatatggcctccaatttgctgcgatcacaacaacaacaatgatagcttatacggtgttcaccatcactacaaccgcgtggcgaacaaaattccggagacaagccaatgcggctgataaccgcggagcaaccgttgctgtggactcgctcatcaactatgaggccgttaagtacttcaataacgagaaattcgaagtggcacgatacgacaaagccctgaagaagtatgaagatgcatcaatcaaggtgactacatctctggcattcctcaactctggtcaaaacatgatcttctcctctgcgctggccgcaatgatgtacctggcttgcaatggagttgcgaacggaaccatgaccgtcggtgacctagtcatggtcaaccagctggtcttccagctctcagtccccctcaacttcttggggtctgtctatcgtgagctgcgccagtccctgctggacatggagacgcttttcaacctgcagaaggtgaacgtcaccatcaaggaacggcccaacgccaagccgctgcagctgacgcagggcggccagatccgctttgagaacgtcacgtttggctaccacccagagcgaccgattctgaagaatgccaccttcactatccccgcaggacagaagtttgccattgtcggccctagcggctgcggcaagtctacgatcttacgtctgcttttccgtttctatgacgtccagtccggtcgtatcttgattgacggccaagatatccgcgatgtgaccgtcgacagccttcgcaaggcaattggagtggtaccgcaggacacacctctgttcaatgacactatcgcccataacatccgctatggacggattgatgcgtcggacgaagaagtgcgccgagctgcggaacgagcccacatccacaagcttattgagggtctgcctgatggctaccaaactgcggttggtgagcgtggtatgatgatctccggaggtgagaagcagcggctagcaatttctcggttgatcctgaaggacccgaaactcttcttcttcgatgaggcagtaagtgatcattccttggtcccacttgattgagataactaatcaccctctctatagacatccgccctagatacctacacggagcaggcgctcctccagaatatcaacagcattctcaaagagaagagccgcacaagcgtgtttgtggctcatcgcctacgcactatctccgacagtgaccagattttggtcttgaaggaaggtcatgtggcagagatgggctcacaccgcgagttgctcgagcatgacggcacctatgcagagctttggaatagtaagtcctcttttctttgctgttaatactccttactaactcaatttcagcccaggaacagacaatggctcatgatgggagcctggagcagagtcaggttgaggatgttcagcccaaggcgtgagatcccatccaacaagtgttaggctactattaagccgtactgaaaagcttgcagcacatagcatccgatgtaaacagcatcatgcatgtcttcggtgatagataacaataggattatgcacaaaagataacgtggactagttcctcatctatagatttcatgattcgctaccctcacggaacatacaccataggtgctgatccatccttgggctggtgcttgccttgagcaacacgcctattatgaacgacataaataacaatctgcgctgcagcactggcgattcctacagacaccataatgatcatggtacgtaggcccgtcgaataacttgagattgatatcagcaactgtccagtaattaccttcggagaataccttaacttacaatggtttgtctcctgcttggaaatactgtgtcccaaccattaacccgcttatcgcagacataacccacatcctgcagtcaactctcatcagctctagtcaagtcaaaataggaatataggaaaaacgcacgcgatgctgatactccgctcccttggatctcgacagttgatctgaacccaaaagttatgtatgggatgatatcccacagcgaaactgttcacagcagtccatagtccccaacgcgaccatttaccgacatggggctggaccttgaaatttactatcaacacaatcagatagcaggcttgagcagctatcacagttgcacctctgaggttggtccggtcacttatgtaggcgaagaagaatacaactccaagtgatagggacgcgccgactgcagctagcgcgtttgctgctgtcctgtcaaatccgagtgacctgtataaatgagcttcagatccatccatctacaacggcagtgaatactcacatgatgatggacggcgtgtaggtggttagaggactccatgtcgaaaacacgacgaatgtagagatgaagtgcggccagcgacggtagcaacacacagtacgaaagacaactttcaatggaatgcgcacgccatacgcgccctcggtacttccgccattgtcgtattcgagtcttttttgaagaatctccttctcggaatctgtgaatttgataatccccgggctcaacaatggccgggtgagatcgggtgatccaggtagaaatagtaataggaggaatgagacagatatagtgaacaacccctcgactgttgatatgttagcgaatgaagtcttgtatttagaagatgcatacttaggaagagccaccgccatcctcgaatgccgtgtcgaccatcaagaagcagaatgccagaggctaggatagggcttagagcgttgccgccaaacatcccaaagaagaaaatcgcaactctcttagctaattctcttttcgtataccacgacgacaaagtatagactgcaccgggaatatatcctgcctcagcgaaccctagaagcagccgtatagccaagaaagatcctcgattgtggacaaatacttgcatggtagcaagtaagccgaagagaaagacctgggccgaaatccacttgcgaggaccaatctgccaaagttactattagaagcaggccttccagggaactggtactgtacatactcgttgcaaggccatattacatggtatctcaaacaccacgatacccataaacatgagctgatttcccaaattaattgtggactgtgaaacgttgatatcagcggcgaagccaccagtcaatgcgctcgcaatattcatgcggtctagctggaaaacaagaagaccgagaaaaagcagaggcagcaccgacatatcgatccttagagaagttcatgtcagcgtctaatcctgatacttcatctatggggtgtcattggtggttactttctgcgagctttttgctcatggctgggttcccattctggtaagggcagcgataatgaagtagagtgctcagaggcgctatccttgagatctagcttctcatcgttcattttgacatccatattatatcatttccctccgttagacgtggatggtagaagagacctaacgacaggcaaggtagagataaccgaggatgaatattgcaagtattagctataaattatagacatccctgcaagatattacctcctctgccatatcataatttataatatggcgtgctacggtaaattccctaaatgaggcgtaccagaccttcaaactactataaaaccacaatttttctctctgggcgccgcgctttaatatcaacgggatttgaagggatttgaagacaaaccgcccaagtgaagccatgtggattttcttccttcgtaactggttggctcgacgccgtagccccgcgacgccaaattgcgtgacaaggcccagaatcgacgacagcagcgaaccctagatcggtgctaaaattccccagatcggcatttgcgacgggatctcgcctattgtatctatatatcgcaatctaacctcgggatgaatttatagctgtcttagtcctcaatctctatcatggtgcctgttaaacgcgttgcggtaatcggcgcggggccggcaggagctattgcgatagatgctctggcgcaggagaagacctttgacattatccgtgtatttgagcgtcgcgaaggtcctggaggctgttggtccgtttatcttctccggagcttattcgcgacgactgacaagaaaccccaggattggcgattcatcccagcctccaacgctccgcgacttcgcatctctggcgacgagaacagctgatcctccactacctatcccccaaagtttgcctgcgcagactctaaaatcggatcagcctcgctttactgagtcgtctgtttacccctacctggaaaccaatatcgactttctgcctatgcagttcgcccaggaacctttcccagaagagcgcagcgagctctccatatctcaccacggacccgaaaccccattccggaaatgggatgtggtccggaaatacgttcggagtcttgtcgagcgccggggttacagcgattgggtctcatacaacaccacggtcgaacgggtcgagaaggtggggacagagtggaaagtaacactccgaaaagatggagagaagagtgattactggtgggttgagtggtttgatgcggtagtcgtggcgagtggccacttctgggtcccctatatacccccaatagaaggcctggaggcatttgagaagaccagaccgggcagcgtacttcacagcaagcacttccgtgggagagataagtttgctggcaaggcaagctaacttcctcacaacaaaatttcaaggttttagggtcatcatgctaacgtaatgtcagcgagttgtggttgtcggcgcatctgtctcagcagccgatatcgcagttgatcttgttgaaacggcaaaggaaccagtccacgcaatcacaattggccatgctgccaacgggtactttggcgatgaggcatttaaccaccccaagatacaaaagcacccttcaatagaacgagtctcgaacaggactgtgcacttgacgaatggcaactgcatcacggatgttgaccacacaatcttcggcacaggctatagctggacgctgccattcctcccagcagttccagtccgcaataatcgggttccagatttgtaccaacacgttgtttggcaaaaagacccgacattattgtttgtcggcgccgtcgcggctggtctgacgttcaaggtctttgaatggcaagctgttctagccgcacggttgctggctggccgggctaccctaccgtctgttgaagtgatgcaaaaatgggaagcggatcgtgtaaaagctcggggtgatggcgtgaagtttacattgatcttcccggacttcgaagactactttgagacggtgagacatctagccggcgagggggaggagggcaagggacgaaagctgcccaaatttcgtcgcgaatgggtgcgggcattttttgaaggacatgaacgccgcaaggccatgtggaagcggttgaacctgaaatctcgagcagctttgatgaataccgagactacacacaaggaagtagctcggctttgagtttaactgtatgtagttatgcctgcatacacggaccataccctgaccttgacacggcagcatggtcatatgaatgtggctgcttacctttagactgtatgctatcagtttattagcctacttctggccaacgactataacatcaatgaaccaaatacttagaacacaccttcattacttatgtcagttcatagcctgtgttgttttttatagatctaatgacctatgaatatactccctacgagtactaattcattcgctaccaactatgcacgtagtctcatcaattattcggcttgcccgggtgtttggagaagaaagctcgtaaaagttctatcatgagaccttgtgcactatcaaagccctgcgtacctctcttagttatccactgcatcccgcgtaccggcattcacccgcgtgcacagggtataaaaggcctcttgtccccagaaatcttcttcttcttttcttttctcctcatcccccttcccccttctagttccgacttcaactaacgtttctgcagatattccttacactgcatcactgggcttacactacccccggctgatgcgaaccccctctgactgataggtagatctgacgttaccgcatatcttcctagtcttattttttgatctagcgacttggcctctgtgcttgcatatgcctcgttgcactgtatcactgggcttacaccacctccagttgatgcgacaggtagatctttctattacttgtaatctttggacccagcgacttggcctctatattgcatatgcctcgttgcactgtatcactgggcttacactacccccggttgatgcgacctttctcctttttttcatcaattattcggcttgcctgggtgcttggagaagaaagctcgtaaaattcccaccatgaagtcgcctctcttaccaagcgtacctgcgtgcacccgcgtatagggtaggtataaaaggcctcttgtccccagaaatcttcttcttcttttcttctctccccatcccccttcccccttccagttccgacttccactgacgtttctgcaggtcttcctaattctttgacctggcgacttggcctctgtgcttgcacatgcctcgttgcactgtatcactgggcttacactacccccggttgatgcgacaggtagatctttctattacttataatctttggacttagcgacttagcctctatattgcatatgcctcgttgcactgtgtcgctgggcttacactacccccggttgatgcgacccttccccttttttcatcaattattcagcttgcctgggtgcttggagaagaaagtttccttgattctatagtcctatcttatcctagcctttcagctttctcaatctcatgagtccacttgcattatttgaattcaatattcccaggtcgcctgcatatatttacgaaataggaaagagactggatgatttcaaagtttgacatatacctagagccttaagccaagtgttaaagtccatcattatctaaactacctaggcactgcttatggtatataatccattgacacggtgaggaattgtgtaaaacctctcctttctcagggctttgtccctttggcatcattgttaatcatcacttcttgttcttctcatatattgtacctctgcgcatcatataattgacggataagatatgttcgactgtgatagactacccaatagaccccatttatgcctagtgctccgggatcactctcatttttgttatgcgggcaagggaggtaagatttgattgtctatagacaaacagaaagtcgctaaatagctattttgcagccggccgaactaggcaaaccaggcaaggccggtgattgtctcaaattctttcatctcccaaaattctcttcatctagacacttctactctcccatctatcttaatcatctttcaccaagctttgttatcattggaacatagtgcaatatggaactcggacgttatatcttccagttaccctcggacgaggaactccaggtcttggagcagaagatcaactattctttttccaaccgaactctgctccgggaggcactccaacccgcgacctgggttaacgaagatggcaataagaaacttgcaatggtgggcaattcaattatgcgcctggtaattgtgaatcacggcctcaaagaaaagaagacgcgtggtatgtgtttctctcacactggctactctttcacaaacttacgatttcggctctggttaggtcaaatctccgatatgttcacccttaaggctagcaaatcctctctttgtgcgcagggcttctatctcggcatttccaaatttgtcgtcaaaagacctacccaattagtcgttggaccgactatcatggcgaccaccatggaggcaatcgtcggggcagtctaccttgactgcaatgagcagatccagccgtgtgccgttgtcatgaatgcattggatattgcttggtctgagtaaacaccaatcaccctacagtgacatacagtacccctgatatgggggctggcgagattgaccacagcctgtatgagtgtttgattcaacggtggggttgcttgcaatgacttgcatgctgcagcactatccaatgagtcttttccatacttttaatcgattccgattgatcctgaggggctctgtacattcccgtggcttggaattggctcctacaaaaacatactgagagatattgtggagaggacgagaaaggatatggttcggagctaagagaattgaatagctgttgcactgattctggtaactattatcttcgtctcgtcgtatgtcctcatggacatcagctgaatgcttgaagcacaggtagcgtcgtagcgatgtagagccgatactgtactcaaaactgcattttggacccttcttaagatattgactgactccagctttgctgtgctcaagattctacagactaactacgtcacgcgattgaaacttactaatcatcttgggcgccagatttagttgactaggcgatcccatgaaggcgatatggcggatatcccaagtaggcctattgccgccatgggtgacttatttacggagtactgttggctaatactgccttgccgctgattactctttcgctgatacggttggtctatcgtggaagtgttgttctccaatgagaaggatgtctagactcggcgatgatacgagtgccacagtgaccggggtatctgaccaaagcgtgccttaaattgacaccattgggggggccttgttgactaagataggggtgattgatacatccgatctccgttgataccaaaaaagcgagtgcgacgaattagaagccaatatttggatactccaccatatgatcaatagcatcgaaccttggagtaaacaacggtgtagcgagcgcacggagttctccttgttttttcttttccaacatttcgttttcagctatcctaacatcgcgccgtactgcgaatccaagttgtctaatttttcacggggtcttctcccactaccttcattatgacactacaggtcaaaatttgggccgactttgcccatgtatccgaggaatctgactcagaaaccaatgaatttcaatacaaaatgttcgctgtcatcaactcggacgatgccatctactacggcgaactacctacccgcaaagccgagacctcgtttcagcaagtcatggccaggccatgctcaagcctacccccgacagcgagatattaccagagtcgccactatctggcgacaaacccttgactcaggcgccactggatctccccgccaatgttcaagtcttcatcaagcgacccaacatgtcccaatatgatgtgtattaacgacaaaatgtagtacacctgctcgcccaaagctttttggaggaggcccgtaccatggaagttcttgccgtacacctacatccttatttcgtccatactacggctgccgcttccggggaggctatataaccggaatcgtgctcggccgccattcgcacgacctgaagaattatctcagtggcggagtgagaaatatcgataagaaagcattcatgaatgtgcttgagtctgctatctatcacttacattcactcggtttggcacacaatgacctcaacccaacgaatgtgctagtcgacgactccgaggccagtggtggaatgccagtcctgattgactttggctcggccgggaaaatcggcagcttgttgggaacatcccgcggcacaagtggttggattgagggtcggattgaggactatggcatttcgaggaaggaacatgatacctttgccctagagaaaatgcgactccggttggacaacccgactttcgacgatgattaatggggaaaatagtgatatgtagagcctatccgccacatggcaaaaagcaagagactggcattgtcacaagtctgttgacaataccattactaccctgtagcaatatcagtcatggaactgccactagattgagataccctgtattacagtagagatccattacgtcttaccctttgggattattggatcgaaattacaatgtcgctagacagagttcatcgaacaatgaatatgcattgtttgtaattattaagagggaggtcgatcaaaaaccggggaaaaggcaggcaagaagaagcctctttcctcacctttgccctcaccctcatttctctttgtgattatttgcttaggtatactcgttttcttaccccgagccaattatcaaaaagagaaatgacggtgatggcaaaggtgaggaaagagcctcatttaccggaggggcgacaagctcttatttgattttcggagttgtcaaaggcttcttacatgctttttccccggtttttgattgacctccctcctaataatcacaaatagtgcatattcatcgaaaataaaagagaagttgaaatcaatacagattggaattggcaccagttgtatatgcttggtgaaggcggtgataaatggcggtcagggatatgcccgtacccgaggcccagcagagctccaaccaatgaagatgaagcaggagagtcaatggagatcctttgaggcttcagccttagagcccggtctttattttctttcgaaaacacaacatgaccagcccaattgcgtatatttctccaccttcagctgagccacgcatcttgcttgttcgatcctatgccatacgagcgtctaccacgctagctttacggagtacttcagctttagaaattcaagcccccagcgcgccatatcggagtacgtggaataagatacggtattatctgtcagcggtctagacccgaacttgaatactgatctagaaaagaaaagaaaagtcttcggctagagctacaacaactaagcacagggaatttacacaagactcgaatcttcgcatctcgcatacgtgcatcaaaataaattgcccaagactaggattgctgctttaccgaacatatccaggcagccccattagaaacggcacataatctcccgggactacatcgccagctccccagtccaagatagcgaccattaactgcgtgataggtcccaaccatatggcagcgctctgacgcggctttcgatctcaagatcacgtcatagtatggctggcgaactttccgctggacaacgtagagggtctttccgggtctcagtctcggacaccgcaacggttccagcagagctagccaatcggaatggcccagttcatcgccaaacaagataccagccccctttcctcccctgatcggtttcaggaggtagtcgttttggaacgaatccgagactttgcaattctcgataaattggttgaatcccgtcgagcccgggagaattgtgtgcgccaagccttggttaaggccttcggcctgtttaggagtgatgatgttcctggagactaaattgttgagttcttcaagaacaagtcctagcatcctcttgtcgtgagcaagaaggatagttcgcatgtcgttgaagcatcgcaggctgatctgtcgtttcatctccggatcgagagcattgatctcccgctggtggagttcaaggccaatttggtgaatctcttccactatttcgccggactcgattgtgattgtctcaacagcatctgcttcagcgagacagcatagcttgtatccgtttcccccggagttggagggatctggaatgagtcggagagtgtccggagttatgagtcgcagttttaatccatgtcttttctgagcaaattcgataaacatcccgatatcaatcccgtgctcttcgcctttgataaggtgcaaaggaatctcgttgtcgaacagttccaacaatccaccgaagacctttgagttaaccattagcaatctgtcttagcccagatatcaaatctccactcgcttaccgtttcagcttccacggcgttagtcagacctcgcgatccaagattgaatgccgaaagcgaatcttgcccaaagacagtatgcatgtacccattccagcagaacctcgcgttgatctcacagatgcgaaaaacctccccgccagcttcatctttctctaccaaaaagtctggtctccaagatccttgtcgttcgctccacggtgcgaacaggtgtcggtttgagtccatccactattgtaacaaccactcagtaagccaaaccgagccgtagaagggatgtagcttacgcgcagtaactcttcctcctcctgctccaacggcacacggagaggaaaccgggcttcatcatccgtccaccatcgctcgataatatcctcgatggccaatctcagagcgaggtgcaaatttctcatgttatcatcgtgccgttgggtagttaacacagggaaaggacacgatgcatccagagatccggctggccaagaagaggagcagtcgctcaacttcgagatataactgtggcggcttttgcccaagaggtctacatctagcccttctgctgtcactggtgagtagtcgacggcatcgtcatcgggaaagctgatcagatggagaggtttcattttgtatgtggatattttgtgttgataatggaaagacgggatgatatatgtccttcatgtttgaatcgaactattcaactagtggttatcccgagctgaggtggagaaagccagatctagtacggagtacttcgtagacgatccctattttctgatgttctctgtatgtatgtatgtaatgtgatgtattcgtgtacagtggggcctctcgggtatatgtgggtccaatggttcacccgagggatccgctataatgtggggccatacaggcagattttgactcgtattgacttgcaattacaggtttgagatcgtatgtacgactatacatataatacagcattgaaacattcatgagcttccaaatggtgcggcatcccatcggacacgccgaagatgtcggttggggtctttgacttcattgcgcgaatgcagccatcggcgattatccatcaggataattgatccttggggaagacactggggtgtgaggtggagagtctcatcccgggcgccaccaccgtacagaatttccttcagttcatccagtgccttggtagcattcggagtcaagggaaccgtgatatcttcccgaaaccgcaattgactgccagacttcccgtcaggattcacggcgagcaaattagccacgatatgctgcttcccctcggttttgataaactcaggagggactgtaattttgtagttgtggctggagagccatttttgcgcgaaaggcgaaagcaaggtaaggagtcgatcgacgttcagcacagacaacgtcccgccgccgcggcggtctggctgaaggacttggagggcgaagaatctgggtggttgctcttcatagctgcagtcggtgtgccattcaaatcggaacattgtctctgatcgggcttggtggccatggctttggaaactcgctggggagggccgaacatcccagaaccaaccgcgctcggcgctgtgtgttattgggaggccgtggttgtggtttttgtggagattcgatatcagactctgcagatatgtgctgttctcgtcgctaaaccctagatgtacttggagcacacctttcgcttcgagggtatcgtatacggctctcaagtgggaggcgtcggaggcgagtgctggcttgggaatttcgattagggggacgagattggaggttcgtaaatctcctgttatagtgagtatgagaagaagaaaataacagacgatacatactgatagggcgggtagaataacttgccgtcagtctggctgtagaaacagcacggaagagttgatgcattttgtgcaaccaccatgtaagatatggaagagcagtcggcgctcaattacatatataccaacagctccaaatgcaacgaagaagaacaatatcacgaatatatgcagcataccctgtgcggaggacagagtagaggagcaatatatttcgactggtcatatagggaatgagacacatatgtagtgtaatgctgtatgattggcatgcagattactgcgtacagcgtatggtacaaattatcagattaattgcaactcctatagatgcggctgagctgacccactcgggaaacacggagagcgcaatgaatgtgtcgtacgtacaaagagagacgaataagaatagaaataagaaaataaaaatagaacacctgaaatgggatctcatcccatgtaacttaacttgtcagggcttagttcaggacatcgacatttaaactagacgagcctatacggcgttggacacttctctccaacttccaacaacctcgccaacatgactgtcattaccgaaaagaccttaccaataggctacaattggcgttcctccaagtggttcattctctctaccatcgcaatcgcgttgtttgctggtctgtctgcccctagaataattgaaacaacacaacactaatatcgagtagaaacattcctttatggcttcctagttcccatcctcggagaaatgcttcgggaccgcctccatgtcccgccatctcaagctcaggagttaacctctgccgctcttgccctacatggtactctcgccatggtctccggccctataatcggtcatttcgccgacaagaatacaggccgcaagaccgcactactattatctctcggatggtgcattgtcggcacgtgcatggttgccggcgctcattcagtccctatactactgctcggccgcgtgttgcaaggcatcgcagggtctgctgtgtggattgtcggcttcgcaacagtcgcagacactgtcagtccgagccgcataggtttcgcaatgagcttaatgatgtcctgcgcaaacaccggagtaatcagcgggcccgcgattgccgggctgctgatagaggccaccgggtactggataacatggtcgatcccgctcgtggtcctgacgatcgattttatcgcacgcgtgtgtatgatcgagagtccgtctagtcctccctctatgccaaccgagactgcgagtctgctttcctcttgcgaagagcagcaaattccatcccgaaacgatagtttctggcggacaatgctatgcaacggccgtgttgggacctgtctgctgattataatctcgggtacaaccgtgagcacgagtttccacgcgacgcttcccctccacgttgaagagacattcggatggggtcctcgtgccgtcggattcctttttgccggccttgttattccgggtgtcgtgatcggtcccattgctggctgggtccgtgataaagtcggaacacgacgacctaccatggtctgtgccgttcttgaggcaatagtacttggcctaatgggtattgctggcgatattccttgggcgggtgctcgaaatatgggtaaaccgctttacgtcgcctgtatcgttgctataggcattttgcggccgtttgtgtctggcatcgcgccggtcgaactgacgggtaagtcgtctctctccggctatgaataagtgctaaaaatatctagccactgccaaagctatccaggaacagtccccagggacatttggacctaaaggaggcatgtcgcgcgtattctctatgatggatgttgctgattccctcgggatgatgattggtccaatcataggcggttcgctgaaggaaatggtcggctataaatgcatgagctggacttggagtaagtggtttgatcttagtataatcgggtaacttactaatgatagcaggtctcttatatctcctcctcgctgctcttgccatggtcttcttaggatcagaagatgctgaggaagaatagttcgggcgactgtgtactttgttcctgtttttcttttccatcggaatacggtgacctaattgggccatcggacccacatatacccgcgttccaagatttggcccgacagctcgggaatgaaaataccgcccacagatataatacggtattctcattggtaatttcaattaatacatgaaaacactgcaccgggtatggaaatagagtaaatacacgtaaactttttattactccctcgcgatcgtccggtggagacccgagatctgcaggcactactcagctgatcggccttcatgaggtcgtctccatgaactagtagctactccatcgtactccgtagctcagctactccatacaaagttcagctactccacgtcacaaattcaagttcattttggtttttctctgccttgtcttgatccatcaatatcaaattcaaatattcggagtcttctcaatcacaattaagcctatcgccccgactcaccctcccgcaatttcctaccttcaattgagattgctcgtagcagattctcgcaatggcaacggaaaggtattcattagcagaggtgctagccgtcgctaagacgcaccctttctacaacccggacactgtataccctgccgatgcagaaacaatccggaatcttcggaagacggtcactgaccaagaggcgaaggctaaattccaagagcagccacttcttgaaaagaaaacactgtaagacaatatcggacatccttctacagtagttagctaggctaatttagctcaggtacaaggccattgaacgactctcacatgatgtggacccgcgcaacacctaccgacaaagttcctacgtgagcattactggcggtggttctggcggggtgccgatgatgttcgccgtggatgtgcacgagaaccgtcgacagagagcgcaatttggggaatttctcaaattgtgcggtgtcattcagcctggagattgggtcctatccactcatgtagcgggagggttttacaggtactaagatccgaattgcacgagacggcgcgatatcctaactaagaacaaggtccctcgatctcacgacggaaatcacagaaaacgccggagccaccgttctcagcgccggaagctacatgtcacctacggatgttgctaaatccctagccgactatcacgtcaacatcctaaccggtgatggaagccaggtcgtccaagtcgtctaccacatctccctcatggcgccggaggatcgcaatcgcatcgccctcgacaaaatcatctacacctccgagcccttaaccggtccgcagcgagcgttcatcaaggcggttctgggcgacgtcaagataatttccctcatgggaagtgccgaggcaggcccctgggcaatcagcagccccgatctgaccggggagcagagcctgactaataatagcacggacttcgtcttcgacacgcgcaacatcctgatcgagatcgtctctccctctgccgtcgacggcgtatcttcgcctgatccaatcctgcttccagaaggagaacaaggtctcatcgtgcagacatctctccaacgactgcgaaacccgctggtacgctacatcactggtgatatcggcaccctacaccccctcccgagcgcagcctgtgctgtaatccccgaggcggatcgggactatatacgtgtgttgcgcatgcgcggccgcgataatcgcttcagcttcaattggttttcctcttatttcgaatttgagaagatcgatgccctcatgcgggcggacgactgtggcattctgcagtggcagctcattatggatcgattggagagtacgccgcaggcgacgctagagatccggctgctgaggtcgccgcctcgagacggtattttatcggatgatgctcttatcaaccgcttcaaggctttctttgttataggttcggataatgaggaactcttccgaatcgtgtttctggataatcttggaggattcgagcggagtgctactgcggcgaagattattaaatttgtgaatcgatgggattgaaccaaaagtattgtctcttctgttgaatgtagagatcaaatattgtttcttcatcctgcggactccgagctttaaatccggtaatccggcttatcggatcgcatccggacttcgatttaacttcttgttaaatccgtttatagttggccaacagtccaatcagaatcactgcttttccagtgtcacattctcgctttctctattgagatggccaggtcgacagtctacggtctaccttaactccggcatcgccatccctcaaatccatgatactcactttgtttaaatagataccccgacccttgattctatcaaatatcaaatccatcatttatttccaagatatcccatctacacattctccagagccatgtctctctctggaaaagtcgtcctcatcactggctcctccaaaggaatcggaaaggcaacagtcctccgccttgccagcgaaggagccagcgtaataatcaactacctctccgatgaagccgcagccaacaaccttgtcgcacagatcgggcccgaccgcgccttagctgtccaagcagatgcatccaatctgtccgatctcgatcgcctcgtggattccgcagtcgccaagttcgggaagattgacatcctcattccaaatgcaggaatcctcccaatgaaggacttggagaatacaaccgaagcggattttgacaacgcatacaatctcatggtgaagggcccatacttcctagcccaggtaagtactagattacattcttgtcctaaatcatagcatttaatgatactaaccgtgttctagaaagccacaaagcacatgccctccggtggcagggtcattttcatctctacagggatcactgctctttccagcgtcgcacccgcctatcttctctatgcgtccgctaaaggtgccatcaatcaaatggctcgtgtcatggccaaagacctggcacggaagaatattatcgtgaatgccgtcgcaccggggcctaccactaccgagctcttcttgaaggggaagtcagaacaggtcctcaatgcagtcgctgggtttagtccgtttggtcggattgggaaaccggaggagattgctaatgtcattgcctttttgtgtggagaggatagtagctggatgtcaggtcagattgtgcaggtcaatggcggaatggcgtagtccgaccgcggatatttgctgtcaacacgcactttacgttcgtcaatgcggccataggaactcgagcctgaggctggtaccagaacttgactctagatggaggctacttttgtcctatgttcgagagacttatatgtgcaatgagagaatcaatgaccgtgtcatttctgaaaaacacgtccatggcgtctaaagcctgtatgaaggagactgctaagtttagcgtcgatcactgacaaccataattcagtaccatttccccctcgtcaagaagtttttgcggttccggaagtaatggaagaggaaagatgcaaccagctgtttcatcgtgcgaacgactattttccgggtcagagattttgacaaagataaacaattctggtcggttctgacttacaaggagtacctttcattgttatacaatgccttgtagatcctctgctgttgttctttatcacgaccatagtcgaaaccgactgctttcagaagcatctcgctaaaacagtattcttgacagaatagactggcaaattccaacagtctcggataaaatcccgctgatgcccagtccaataaacagacacggccatcatctaaccagatgatgtttcggggggctatgtctaactgacagagcaccagtggggtaggatcaaaatgaaccttaccatccccgggaaaaagccggctattgaaccattcctccacttgctgaacattgctaatggtcagattatttgtatctggccagagtaagccaattgaagggccaccacacaggctaccagccctatcggcggtaatagagtgaaaatactcaagaatgtaggcgagtctctgaatgtgagagtctgaaagattatcgataatcttgccctgaataaaatccgatattatatagccccaaccctcatcgtccataaaaaatttatgaaccgaaggaactataatgatatctagattaattatgctgtatgctttttgctgattctttgcctcatgggaggagacaaaggggccaaacttgactaccaagtcacaatctggtagcttaacgacctggttaccagacctcaatcctccagtaagctgatcttctggacaagaccggcaatagtcaatgatcgactggttattgtctagttgaacagtcatggcagcatcagacattagaaggggggtagacggagtaagaatgggaaagaaaacaatggtacacatgatctaccgcctcggataatagatagtcccttagctagccatacctgaccaacttgaattcaaggaaatatggtaaatttgaatcaaaatcaaattctagcagatgcctggcctattagtcacataagagtcgtggttcataactagttaccggtgctgcaacagatggggggaggtggtatcattttcactccatttttacctgcctgcctgcctgccaccacaatgcctgctaatataataatgaacccagtcagcatggaataagggtagtcccttacaccgtgcggcgtggcggcggtaggggcagggccagggggattcatattgaaaacgccattagagatggcatcgaatatgcattcaaagatgagttggttaagttcatagacatattggcgggtatagtggtgggaagcagacaggcaggtaaaaacggagcgaaagatggacattggagtcacgaactgtctgaagttactttggacattgaattcttatttatagacgacacgaatcatgtgatttactagtaattagtaatatagggacccggccgggaggctttacatgaagtttaacctagcactacctgctgtcttttgtgaaacgttgtatttttatattttttgaaaggccgaaaggcctatggtgatgcgaccaaatctcttccttgactcttgctctagccatatctctcgagaggaaaccctctgctttatcatagaccgtctgatagctcgcgcttggggacgcattaattaggctaaagcccaagtccatccgccaagcccgcaactatctcatacaaagcccaagccccggggtctgggagttgctgacttgaggcatccccgacatacgttgctcggccgaacttggccttgagatgtcttgtttcctccgcctttttagcagccacatccactgctgacagaaaatcatttgttttcgaaaactcctcgctgaaagggagtaaaacgtccataacagtacggtctccttcccttgctcccgtgtgcgacttcagggttgtcgtcgcggacgccagagcagttgaatagaagtttggcgtattagggcagattccctcgagcgaattctttctcagggctgtataaagagcggaaagaagaactccaaaaattgcaccgagggttccacccatgtcgtcgacattctgcaacacagaccgaattacctctagcagatcgcctgaggctgtgcagcctttatcgacactttgcaggactgattcggccaagccttggactgcctcgccacagtctccatcgcccatgaccatgtcccactgggtcagccttggctctgctgcaatggctctttcgcacgaggtccttatggtcttctccaaaagtaaagggtcaaatttgatgcgaggggaagcggtaatttggctgtttacctcggcatcgagattatcgaaggcggtcttctgttgagaaggagagggacgggcggtgtttggccaagagacagcagtggtgggacaatcaaagtgccgtatcaaggtcgcgacagattgattcgattgccgagctgcggcggtaaggttgcagagagaaatcgaaaagcctggcgcgttgagagacgtttcaaatgaaccaaataatgttttgcaaggcctgatgttccatcgtgagcttaactgacattgaatctcatcggtcagagcagataactcgaggacagagaggccaccatagttgttgaccagtaaaccaatttcatcgcgtggctcaaacttgacaaatgctcgctctgtatcggaatcatcgcaaaggaatttgagacactgctcaataagttgctcgacagggggggcgggggaaacatgaagttggccgggctcattatgtataccggcgccgacgacaaccacattgtctgggacggatgattgttggtgtctgcctggaacatggcaatggtcaagagccgaggcgatcgtaaccgtctgtccatttactgcttgtcccagtgcaagacactgttcaaaggagtaaccctccgaggcagctgccccgatgatcttcattgctacggcgtatccatcagcagccatcaaaccagggaacaagtaacaatcttactaaaaatatgaccaggtagccctctcctacccatgtggctatttttacttcttccaatggagacatcatctgtagcatgtagaatggcaatattttcaaccagaccttcagccttagctctctcggccgcaaggccgaagtgaagacgatctccagtgtaattggttatgagtagtatagtccctttcttcgatggggccgtccgaatcgcagccaggatttgctttgcgcttggtgacgcaaagatatcaccgcacgcaacagctgatagcaggccatcaccaacatagccactccacgccggttcgtgtcctgagccgcctccgctgataatgctcacctttgagtcatcatgaaacgcattggaaactactctctctgtgtagttcaaactcaagtgatcgtttgcggagacaagagctcgcagcgctcttgggaccaaagaattggcgcttgttgaggggaagtagtgtttgtcggacatggtttgatgggtaaattattggtagggaaaggataaagcaatttacctctaaatacgtggttcgtaccatcttttaaagtgtccatcccgacttagtctctccatgtgactggcttcgccaagggttctccgagcttggtaattccgtgagtccaaatttgaagagagatcccggagtggagatagcggtgttcatattccgcacatgttccaccgtcgagtcgggaggcctaagttggtactgccgttggagtacatcacgagacgtcaaagtcctagcctaaaaaggaaatcccgcagaatattccgaaaatggctgatgaaactgaattcggcttttctcttcaccttcaaaatcattttcgaaaataagagattccttgatcatggaagttgatttagatttctcttacaagagttgtaacttgttgaaaaagtcatgttgtattaagtatcttttgtattgagttgatatacaaaagatacctaatggaactgtgctcgggatgtggggccgttcgatctagtagatccggtttgacgaaaagtccccgcctcgcggcccacaaagtttatcaatcaggtacggaggagatcgaggtctgtacctgcttcatcaaacaagtaggtgatcaccacaaatcctgggtttagctagaagcctagagctggtgcagtagaggcaaatgctgaaggatttcatttccttagattggatgaatggcaagtaaatgttacgtgataactaacttgatagactatgaaaagggtttattatgaatagaattactcctagactaatttacagtggtacagagtgtctaaccaggtaggtcgttcaagagatcaagacgcgttcaagttggcttgcacgagccaagcaagtcctagtaccaggattgaggtgactgggatagcaaggactcgtctagcagtgaaacaactctcattgatcttgctattcgcaagtctgatgctctgcggctttagagattcagcgaatctctcaatctatacacagttagcatatggctacagacctctgtcgaataggtattactaacctgttcgcatgcagtcttgatctccaagtaattgagatccttggcgtcattcttctgttgaattcggtggacaaaacgacaaaagaccttgcacaccccctgaagacctgcaccagattcgacgacaagtccaatcgcctccctcttggtgattttgatatttcgttcgaagagagccgggttgcggaaacataactccagtgtagccatcgccatagattggggaatagcacaaaatctgaacacgctctgctcgcgcaagccagcaagatacgacaaacaatcagtcgtatgtctcagagcatccaacaccatctcagagctgcagttaagggccagctcgtgattgtcgggtttgaacaggtcttcgaaattctcgacgtgtttggaccaaatctttttcggccaaaattgtcgaccgtcatcattatcttcacggatatcgcgaatgatattgttcttttgcagtaagaggcccatggacttttgcaggtgagactgattgatcacatttgcatccgccagatcagcttcgacaaataggcgggttaggccctcgccgaccaagccagctacataccagcaatagaggtcgtactcttcaatcgtattgacggctatatctccaacagccgccttttccacgaaatcggccatgccattccccattttatcagtggtatccttgatgatcgcttggtagacaggtttcatttgtcggaattcagcaaccacgttatcgaactgcactaatagctcgcgatccttttcttcggggcggttgccggtgaaggtccagccatcctggtccaggacatctttgaagtttcgaaggagcggcacttttgtctcgagggggattgaagtatcgtcttcgatggtatccagaccacgtagtatcaagtagaacacacaaacgggcaaacgtagctcgggatgcagttccttgacaacgggactgtagctgcgaccggtttgatccaggaagtcgaaacagattttggttgaagactcctgctgtttatttctctcgtggataggatggcgccgcagtttcctattaacggtcagtacccttcgaatgcagtgtttgtaaagatgttagagatggctatagacttaccattggattatcgtgcggagctggttcgggcgaagcacaaagtaaagaatatccgatatgagatccatagtagggagtgacagggtcttgttcggaaaactttttacagaaaatctagttaggggtcgattgttagttattgactcccaccaaaaacggcccggaaacggcccgctatcgccttcatcctttttgaagagaattatatgcaagaaacagacgtatctgtatctctccagtctccgaattgcaaatatcgatatcccctctgatcgccggtacttttgttccacgccatggcgtgtcttccggtaggcgtgcgttgacagttagtgggactggagcggcaaggccatcgtatgaattcggaaacaataccaaccagctgatcttcgtagtggtgaaaggtgttcgcagggaacaatctcgcggggcggcaaaagccagcaagagcgactggattcctgcctccagaatgattggatgaggtagagttgaagaacatagtccctcggcggctgtggtcgcgatggcagcgcaggaaatgtccaggtgctgctcagcagaaatcaaagctctaaaaagtccattatagctcagatatgactctgcgagtgaatcataaaattggtcaatattaacaggcctcagcctgcccggcctggtatttttgaacgaaggtaagatcaatcggtcgagtgaatctggcctgcaaagttcacgcgtaacaatattttggcgatagtgggtatgttgtgattcgcagctccgctgacttcaatattgaattctgtttcaacgccgtcgatgccttcaacatttggattgacaaggtcggcaacggacaatgagatatcaaactctaaggcgggtccttccagtattaccgattgctctagagtaacgtctgcgagctcgatgctgtttactttcttttcattacgcatatccatcgcaaccgcaagtgccgagacgcaaatgatagatgcagggacaacggattgaccttgtatgcggtaatttttaagccatagaaaatcttctaatttgaagacgtgccgccacctcggcttcattccaatggtacttggaacgcggcctccatgtagcccttgaggtagtcctgtcataatcaagttctccaacggcagtggaaaggatttgaatcgcctccgaagtgaacgatgaatgagaagtcaatcctcgctaattgagcaatatattggtacttaatcctggatcaccgtctctccagtaaccagcggcttttcatatgtctctgaagccgattcgatatgaacagttcataagtacgatgggcatcgggtccgacacatcgccccggtccacgtccgaagagacccagagctgacatcgtaaattagagtctaacaccgaaatagaaactttgccgaaactcggatctggccgaaggactccacagccgaaatctataaagactcgtaatgtactagtatttcagccctggaggctacgaccgagaagatgtgctgtttgagaaagaagaaaaaagacccggtgacaagaagtaagaatgaatgttctgattgccaggttatgaaacctttgatatatctttcgtacaagagtggcccttgagtccaccaaaaaagaaagaaaagaaaaatgacgaatacgtttagaagtcttctccgcgagaaatcacttctttaacgttaggccgaagtagaattgtctgagttccgtcagtgagatgttcctctccagaaaagaagaaggggggtgacttgcgtgttcgaactgggccgaataggtcccctgtttctcattcagaggggggtaatcttcgacaattcccgatttcactagattattcaactgtcttttatgtcagtcaatagttccaatccaatccaatgttttgaaggcaattccatacaccaaggagatacttctcttgtccaattctgtccaaatagcgccggcagaaagggatagtgctgaaatttttcttgatagcacccaatacatttcttgccgaggacagagttagatccttcctttttgcgtcaccgcgtagagcataatgagagacttcacccccttcgacgcatcggccggcaccggtactaccaaatgtttcgatagcaaaaacatcgccttcttccatctttgtcatatcattggatttgacaaaagggacactcttagtcccatggattgagtaaggaaggattgtatggccgcacaagttacgaacggcctttatcggatgagtcttaccattgatttcacactcgtagctttccatagcctcttgtattaagccacccaattctccgactcgaacatcgataccggcttcccggacaccagtattagttgcatccttgacagctgctagtagattatcatagataggatcgaatgccattgtaaaggcactatccacaatccgaccgccaacgtggataccgatatcgaccttaagcacattgctttccttaagcactgtcttacagccagcgtttgggctataatgggcgacaatattgtcaatgttcagaccggtaggaaatcccataccagctattaaagagtcgccttcggtaaggccatcatgccctactaaacgtcgcgcactatcctcaatgccgttggcgatctctaggagtgtttgaccaggcttaatgcttctttgtgcccactgacggacctgacgatgtgcctcagctgcctggcgataatcggaaaggaaatcggaattcagattgtccaggtatcgcttctcctcgctggtagttcggtatcgattgtcgtccttgtactcgacctcttctcccttggggtaggtgttgttcgggaacagctgggagatgggaatcgatggaggatcggtctgagtctttggctgttttttgggcttcttctttttgttcttcttcttcttggcagcgctagcatcaacggctactgccggttgatcttcaccgtcatctgagttctctccttcccccgatatccggtttgctgcggcgcggttggaaacaggcatgtcggctgcattcgcagcagcgccttagcaatgaaaatagatgtcagcatatgttcccgctgactcccatgtgtcgactgaaatatattcttaccctgcccgctgtttaccagcttctccgaaagttctggcgggtcggttgtcatgtttagcactgggaggggggaagttggaactccaaggatgggaaaaatgctctccaaatttatctgccccagaacaaagacaagagcgcctacaatctgtcgggtgaaatcaaagttacggtttttaatactgtctcatacactagccaggtgactgaaagaaaaaaattcattcactcaactccaccgtggattatctcaggaatcccactcttccgtacagtacagtcacgcctgtatttattgattaatatgaaatacagtgctcggttgttaaaagacaagaaaaatactcgtttaaaaagatcagcgagatctagcaggagggtatatttagaatgaactttagttgtagatcgatgaactagacttattctgactattttatcagctactcccagacttgagttatttgtgttgaagtgtttcataatgccaagtccatagcaacaacatagccgtcttaccatcccaccctgggagccagggtgggtctgtcccataggatagtatctggtagcgaatttgtcactaagctagaaggctcggggggatagtatattgataatcctaagagcttccccctgggctacttagtcccgtaatagaccgagaatcttctcaggatcaaagggataaataccacgagacctaaaagatgatctaatagtccgttaggtaaagccctgctatcggattttatcaacttgccattgattccaagacgaaagccatcaagaatgctgattcctatgcatggtttgctaccgctatgtatctcgatcaatgtgactggtctcgaatgatctgcgctcagagcaccagcacttcaactgtcactaggcgatcgaacaacgaaacaaccactgatatgcctgttatgcgaaagacaaattggcgtactctattcccccgtgtattggcaggattgcaaggtgatcggaagtaagcatgatttggtacctaggtatggtgatcactcgcaaagatgattcgaggcgctataagtcgatgttgaagctggagttcgttcacaaacttctcaggcgtacctgatgcagtgttataaaatgcgcgctggcttgatggatatgaagctttgttgatctgctcttaatatatctaccttcctacgagacgtttcctgggcttatttgatgtgcccgagtaatcttaaatcaagttaaaatgaggtcattcaagaggccatcggtcattttcagcacatttgaaggaaaactgtgaagcctgctctatcatttccttcctactacaggtcatcgcaatcaccttcgagatctgctatattatatggcgggcattctatcggttgagttggtagaggcactgacacatagttttccggtacatagtgaacaatctccacaaattcaatatgccgcgattcatatccaatcatcccaagatcttccagctggccaaagaaatatgacatgatatccagaggtgttctcccgcctagatcatacctcactttttctttatagattcgttctccttcctcgttaacaaatttgataaagtaaacaaaccgcctagcagtttgtccctggtactcacaagtaccctctttccacatcacaggaatttgagccttaagcgccgccgagggatactcaatagggtcctcaccatcgatatgccagcagggtaacacgctaaacttttcaagagaggaaatagtcgctggatccaagtctacagggaagtagattatcaggacctcataaagcataggaggagacatcgggtgggctgctatgatatgccccctatccgggagcaggcaggaaacttctcggctccatgagcgagttgcaagagcttcctctaatcggagataaagttccgatgtacaaaactcttccctgtctctgctgcttctccactctagtatttgattaatttttggacatttaaaagacgatatagcaagcatctttcaaaccaatagtgtaatactgcgtaccgataatcaaccactcaatattcctcagctcctgcggacggcctcgggcgataccggtacactcttggagtttttgtatctcttggaggacggcaaaaatttcatcgctattgggaatgacaccattgcgtgtatctttgagcgatatccattctagaattcgacggttttcgggcattttggctggaaatggatctttggagttttttcttcattttcttgggattatttctcccggtgcgtccgtttgatcgagtggtgacaggcataggaccttggaatgaaagatgtaaatgtcaaagtgcaaggtcggactcttcttgtacgtagtggatctggtcgatagtattgctgaaacataaaatgtacatatattgcgggtaatatgttaacagtgttgaaagtacggttgctctcacgttgccgtacctatttgatgaccgcaaattagaaggatctattgttatgaattcaatacgtaaagataggacgtggacctcgggatgttccggtccattaccccccactccgttatacgcctttgtaatttaaacgggagacgtttgctctccgacagtccgatttaataaggctctagacttaactggtacataacgaaatatcagccttggagccaagtatgctggtatccacaggccaaggccactaggcatgcacgcttggacaaatctgtatattgtacaagataatttgctaatgacctcggcagcacgtatgtacccgtagcggattctcttgatagcccccaaatgctgcgccttcggccgacaagaaaacaggactgtgatgggcgagatttatctccgacagaggagtgtttcgcctcgtgtatccgacaccccacgcaggatgtattcactagtaatccatgaagttggaaacgaacgccacaatgctacggaggtccccaccagcacaccaagtccaatgacatatcatttcctgtctcttgatgtagaataggcgggtaaaaagtacgaagggtttgaagaggggtctatttgacctatggccgagtaagcttcaaagttataaaaatgtagcagctatatccatcaccgaaaagcgttagcttcctaagtttcggttttaaatcgcttgtacctctcttcctttgttcgatcaggctcgtcccattagtaggagtccgtactgtattgggcagaaccggaatcacgccggagtcacatcattcgccgaacgtgaaatgaacatgcttgtgcacgatctagtgcttgcccatctagcctgcgatcgctaccatggccagaagttacattgcaggagagagagtaacagcagcacttgcgtgcgatgtgctcgggctggtgttcgatgtaccccacgacaaatgaggttttccaacccactggagacaattcgatatgctccggatctgtacaaatctcctctgggttctcacagcttcacaataaacacggcatgctccagcggccttgtgggagtcgatgtagcctgtaaaagtctacgggcagggacattggctggcgccatgggtggcaggtgtcaatttatggctttccccagaacatactaaagaaaggggcaatacgcgcgcggcatactcaataagcggcaaatctcacaccttcgatgcaaaggcagatggttactgccgggccgaggcagtcaacgctgtgtacctcaagcatctatcagatgcagtgagggaaggtgatcccattcgtgtattgttcgcggcacagcaagtaacagtgacggatgaactcctgggatcaacagtcccagctctgaggctatgtagtctctcgccattttcatgcgggttttccttcgactgtctaaaaggccttctcgaatccgaaaagccaggtgctggcgttgcccatggcagttaagagttgagagtaccatactcaaagatcactagatgtataccaaagcgtcaagtcacagacaaatgaaagaggttaagaaatatgatgtcattgaaaaccatcgaacctacgcgataactattcacagacgaacgatcccgggtatgatcacaaaacgaatccagctaagtacaagacacgaaaacaaagtctatgcaggagacaacctggaagttccagctcacacatgtaactatttcttggacgacttccgtgatccaatacccagccggcccaggttcggaagactagacttgtgcttgtgagcagatggtccagccttcgtactgctctccaatacacgtccgacagtggtgccaccggcgccatgaccagaacccagcgctgaatttccaatagtgacgttactggcacccgaagcattgcgcggagtatcggacagactggcacggtgtctggggcggtctgcggcagccacggagagagcggctgtaagagaggggttgctcatagggccggactggtcgaaggagtgacgggtggggcccagggctgctcgacgggctcgttcctggacggacttgaatttgtcgaggagttcgacccagcggatggagttctcgtcgcgggttttcaggcgggtgcctgtagcacggtcgaatgacggggccgtttgtgtggtgctaggaaagttcgtctcagtaaactttgaggtagaatgcgaagaacagcagccatacctgcggattccgccgtggaggaaaccaatattgctaacgctgttcagacgattcttgagggcggcgaaggcggagctctgcgggaggagcatgaggacgccgtagagacatttgtacaggaaggggtatttttcgggttcaaggagttggaggcggagatctgttggggttagtctctggactaatgttgggttgatggaaagaaacggacatgtgaatacaggtgactcgagtagttgcaccagtttgtcgatttggattagcatattaactgtcatttccaattcggcactgtgatggttccgtcagcggatatcgtggtggatggagctggtatactgacaagacttggaggagattgtatgcctgctcataggcctgggcaagaagacagagagaaaacgtagagacagcattgtggcaccaggatctgaaaagcccaacaaagaacatttgaccatcctaaatatttcattaatctcaagacgtaggacagggtgtctgggtgtattactctggaatcgagatttcttaagcgctttcttaaatccgcgagttcgggcgctgtgatgaggttgttgttcaagttctgaaccatgatactagcaaattcaagatcctgatgatacattagcatataggaccccaaaatgtgcaagaaacatcacctcttctttctcgaggcattctgccaaagtccgatagatacgctccgggctcaggttcagagaaagctgcctgatgatcagatttccacgtacttccagtagatgtctgtcagtggagtagagctgcaacaggttgaccatgaaagaggtaaaatagctatcctcgctgtttcttgagatctgggaaaggagctgcagatctttggttacaactgcctctgaagggtcggatagtgtctttagcaaagctgggaaggtaccatcattgaaagcgacaaccttccgcggggctttacggtggagcataatgagccatacaagggccgcaactctagtggcttcattttcattgaggaattggagagtgagggagttgacggcagcggcgtaatcaaggtcgacgggaggaagcggcgtggaaacattgctactacgtggtggtgtagttgcaatggaattatcttgggctgtttgtttctttgtgtcaatgttcgctgtctctgaaggccggactccgggagtcgacgaccttcgctctatagtttctttgctggctgtagtgaaagggagttttgacgatggcgcctgggattcctcgcttgtatcatctgacaaggagtagatgtattggacaagggacgtattgacttggtttgctgcttttcgtacttgatctgagccactggacatggccggaagtacttgagtgagcagccgcggaacgaaaggaagaatatcttcagggctgatctcgaaaaaggcatcaatccaacgaagggccgtcaattgcatttcctcctctaaaccaacgtaagcatatgagaatcagaggggtaaagccactcttaccataggtggtattgacaaagccgacaagaatattaagaatcttggggtggtcgatctgtacatcttgtcccgggatccaatctccatctgcctgagcgagttcatcatcatcgagtgtcgaatccgaggccgagtcagcgacggcaaggtcaaatctgcggtcactggcgccatcggcctgggaattttgccccgtcgcattgctcatcgtatcgctggtgggcgactgtctgttgcttttctgacccttccggctttcctcaatccccttcttcagtcgggtaatcctcttgatctccgataagaaccgatcaagcaaaccttgggttgcaatattcacgtctttgttaggcccaccaaggaacttgatcaatccctccaagaactctggcaaatagctcacgagctccaggtcagggattgtatctagaagggtaagccacgagactagaaagttgcgagtgaacggttggatcacatgaatccgatctttaagcagaggaatgaatcgtgcaagagagaatgccatgggaagttcctgctcatcctgattctccaattctggagtatttttctcagagagctgtaggatcgacacatatgaggcggcagattcagctacgatatctttcaccaggcgatccagaagctccgcgccgttcttgactgatagctctgcatcggatgcaagctgtattgaatgtcagctgtgttacccgaattaaaccgatcgacacctctcaccttagccaacgcgtcgaaaacctcattgaagaacagcaatatctctcccttggctactttggctatgttatacatgctctcgcatgcatagtaccgcactcgtgcatcttgatcggagaagcatgcgagcacaggtggtacaatttcacccaagtatggcgcaactccttcctatatcccaggtatcagcgagtccttcaagtagttatagccaccccttaccgatcctagtgcaatcgaggccgcagccaatccgatcaggcctccattccgggcatggggttggtgcacggcgtatgcataatcgtggcagagctgctcaacgatcttttggattttctcctggtctccttggaaaacagcgtcacggacaatcttctcgagcctagtgtagatagacagcagtcagtgtgggttctttcaagtgcggagcggtgaaaccgagctgacatactccaaggctccctgtttcctcctgtcgtacagcttgtcattcaataaccgctggattgcttgatccattgtcaaagcagcctatgctgcaatctttccccagtatggtaggctaagcactgctcattgtgaatggaaggtatctcagcgcgtctgtttcgcgagacggtcgggagcttggaagttgggtgtggggggtaagtgtgatgataaggcgcacaagcacaaaagcccaaatcgtccggcagcttttcgatcgtggtcacaagtaaaatcctaatgaacaggtgagggagatgcgttggcagtgtggagatagagcggtggtgtgacgtaaggtctgcgcgctcgagccttaccgccttgggctttagctctagataagtcgtgcacctgcaggtgccggattcgtaagctgcgatggaattaaagcttttttatatgattatcttaggtgcggtatgcgtgatgaccataagcaagataaacggaatataagaacaaagaacccaccccagcttcggaacagggtcttgactacttggcgcccccttttagtatacaaaggcaaaaattgtgagctgtactcgtataaatatctaaaagacatccttaaatgtagatataatacccctgatatcatcttgggccaaatagatctaattactaaagtcgtatgttgtatggcgccaaggacagagacccgtgagcaccgactatttttgtactggtgacttgaataagaaaaatgtcaagagataaatgatttcaatcttagacgttgagtatatcaaagtccaagtagatgactatgaaacaagacgaagatgagaagcagcacatgaccaagcaggcatatcgcaggagatatcaagatctaaaatgagaaaccagatcccaacttttcgaacattgctccccgctaacacatagatatcataagactgagacgcaaaggggagtaaacaatcccagaaaagacaaaaaaaaaacaaacaaacagacagggtgactgtacaagaattcgtcgagactccgcggaagcatcacgcaaaggtatagaacagaagaaaaagtcttcagaaacgagagaacaagggtgaaaatgctaaagacaagtagaagaaaaagaacaccgataacacaaagaatcgctcaggcatgtcgactggaaatgttcttcatcgggatgcctgagactggccgctccatcctgatgggcgccagctagcagtggattgtttggatgagccggtactcgtgggcgagcttgggcccgtgtagacatattcgccgtcgacgtattgcgcacccgtggagaagttgctgcggtgcttgcgacgcgcatagcgctgttcgaggcggtagagttcgagttctgctttggtattagttatcccagtatttcaagatttcattgcatttcgcagtgacgtagcatcggttggatgttttttcgggagtcgcggaacgtactggcttgtagtttatcgaagagacccattgtgacggttgaagtgcaaaatgtagcaatggataggcttaagattgggtgttctgaaactggagagagtgtgaaggcgacgatcccacgtggtggaacgcggtggaacgtaacgcgagcggagttatgccggaggaaaaattgacgtctctgtgaagaacgggtcagtccctgacgatccacgttgacgtgtctgggtataaataagaggctgggcttactggataacgatagtggtttcggtaagcgccggtccaaggccgagacttgagataagcaggagtgagggaggtacagggtctatggctagcgggacagcggggttaaagaatgtcgagatttcaaatcaattgaatgagagtaaagagggatacgatttccccagaagtcatcaagagtccacgggtgtcgaggagaagaagagagccttgcagaaaagaaaaggggggtgtggggagactcgactaaattagcgcctcaatatccggagaggctagacaatgcgcatgtgtttcatgtagagatgttgatatctgcgtacggcgtattgatttggttgaaattggtagacgagtatgctgtagatagaatcgaggacagtgccatctaacctgcacctcaccaggtcgaatgtttctttttatagacaccacgcgacgttctcgatgtccagttcgcacagaccggtcgacccgctctatcacgacaatccggactaaactggatttgacaagtggagagagacgttatcttaggaagggatttaggcattgaaggggcatctcctaatctaataccacgtggtcgcaacgtctgtgctgtactccgtaaacggggggaacgggcctatctgaattattgagactagcatttcaataacagaaatataatgtggacttcaagcacatctcgccttcagattgcgaataaggcctgattgcgggtccagcaaacaacgaaggttacccgaattcgtttgtgtacttccgaatcctgtccgttggttttatttcaaggatggatacgtgtaaacagttgctgtgtggagctttgcagatattgtataatagcgtgtttgccgccgataactctccaagatatcaactaggcatgctgactaagtattcagctatcccatctgggcccttacatttgaagccttccatattttttagaagccaattcctcattcctgcctttgtaaattcatttcatatttggcgtggcaaagatctcggaacttccggaaagtgcgggtgcatccggaaaacagaagtgggttatgggtaacctgccatgtctaccatcaaccatcaaggttgacatcatggttgacacacagtggtattttggacggattacctctagaacaccatttatggggtcgtgtttctcaaaatgaggattcagtcgtctcttccgagatttcaggctttgttggaatcttaccactgcgataatcctacttttaatggtagttgtttatatagaccgtctggtttttattgtagcttcgagaagccgatttggatatttcaaatcaatggtgataacagtgataaccatatgcaacaatatctttgacctgaatgcacgcagcaccatacagctcacattcactccttcttagacattttctcgcccgaatctttcagttccatattgccaagttcctctccatccactatctggccgagttcattcggtagccggggtccaagatactgaccccttttagaaaagacatacagtgcgagtacagccgccgtcagaccaaccgacacgacagagacgtagttcatattctctttagtcaccggcatctcagtcgggaggaagcaaaggatgtcaagaagaatcacccatagcaccgagataagattgatggcaaacccaaatcgaccgagcgaaaagggccgctcaggcataatgtgccgaccacgccacaaaagaatagcctgcggcagggcacaggaagtttgcaggaagattacggcggcaccagccatcgcagaaaaggcggttgatgagccgaggaaaatcaggccgtatagctggtaaccggggttagaaatgaccaggctttatcacatgagatacttaccgaaacaacgatgctactcagacagagtgcattcagtggaatctgaaagttagggttgacgattgcccatttttcactaaatggaagcatgttatcacgtgagacagcccagatcgttctcgagcatgtggtgcctgaagtacaagatataagcaagtattcaaggataatcttccaaaaaggagtagactcaccattgccaacggtgcacccaaaaaagcagaacgcgaacaaagccaacagaacagacgaagctcccttagacccggtactttgatagtaaatctcgattaggggaacacccgatggcgaattcagaactgcgtccagatcggtaatggcattcatgcaagcggcagaaaagggaagcgcagtaaccaagcccataaggacgggatataggatgaccttaggcgtgtttcgagcagggtcatggatctcttcgcagacatgtgctccgcagtccgttccaagaaatgcgtacacggcgttactgatcgctagtaggaaggcgagcccatcacttttccaccctgttccatttgtggcatcgccgagtgtccacttaggagcggcgtggtttgttcgactgcaaacgaacagcgtgatcgttgttgcggtgagagtgacacatgcgacgaggactgccgataggttaaggtcgttagattgatattcaataggaagtagagcatggattgaccaacagttcaaacgattgtaaagaggaagaagctgtgagccccaggtattgagtgcgaccgagagccatactatgccaagatagacgagccattgttgccagttctggatctcatagtctggataccagagaaccacgatggacaggattagggatgcaatgaagttgcaggctgcaccgctggctagccaccaccccaaaatgctcaaccagccattcctgcacaatatgttagcatcaaccatctgataggtattggaagcacgaacatgtaagaagcaaaagctcgccaatctttagatgcaagacagaatgcccagtagtactgagcaccggcgactggataggccgatgctaattccgccacgccagccgacagaattgctgtcatgagagcagccactggaagagaccatatagtgccagcggccgaggcctcctgtaaagagataccgattgatgagccagtgccggaccaagtgcacgttagactgaaagagagggcaacaagactgaatgtggagaattgtcgcggcatcgcacgttgatatccgcgagcttcaagatcgatatcatcctggaactttggcgaatgcatagtggtggtatataccctgttatgaatcttttgtttactgaaaggcaacatggcacattccatgacttatatacttctgtaaatgcacaaaaaggaacagcctggcgaactcttcgcctttagtcatcgttatcttcactgctgtttctcaatcaaagcctgaacgttgaccccatgaagttgaacttcacaatctattccctccgctcccgataactcgatggacggataagagcctcgatatcgggtatggatgaggtctatgtaaacgattggccaacactttcacgcctttaccgcttgcttgctgattggtctgtttccaccaccttctttggacgtttctccaccctcagaccgtctgataacctcgtaatatccctagaacgcacttccccaccaattctgcgccattagcgccaggttatttgatatgatttcttccagtccactgtgccctctcaacctgccctgactatcattatacccccaacagaagtcactcctttccccgcatctgagcgaattcttcctcggcggattgtcaagaggagaggaaccactcgtgagcgcacgggatgtctgacctgccgacaaaggtaaataatcgatctatattctccatctttgctctggtcgatgtatatatacttacttctcccagaaagaagagatgtgacctcggccaacctatatgcaaagaatgtgtgcgcttaaattataggtgtcagtgggaggaccctagagcgttcggcgacaaccataaagctgccccattgcagcaaatcgctcagatcaagaatgaccaaaatagcatgtttcgcctcctgcggaatcccgatcctatcctattctgggtcgatgcgcactccgattgtgcgagctcgtcgagtcgacgtcattttctccgctattacactcaaacttttagcattcttctcaccagtaacatggaaaataattgtttcttatctggtgggtctttggtgttgctccatactttcacacctagtggtgctgactccgtcttgatagcatttctccccatggccatgtatagcccgcccctcctgacctccttggtcgcttggtcttcttctcatttgtcattacgtgatgattcgttcctgcaagttgctactcagaatcggtgcttggctcttcgggatctccgacatgcacttgattccgatttagtcaatgtggagatcacccttgccatgtcgttggtcttgtgctcattggagagcataatggccgataacggcaatgcttggtatcttcatctcgttggcgctgccggggtcattgcctccaaactcaatacgccggagtcactaggaggctccgaacaaatttcggaacgcatgctacgacatttcgcagatgcgtatacgggccgctggctgctgcgcaacttcgcatatcgcgacattgtaatgtccgttgcgcaggaccggccgcccttgttgagctcccatcagcttctaacactggacgagccccagctgcctgattcacattttgggcttgcgtcggagatcttagagattctctcaatcaccagtacactcaaggggaaactgaagaatttgctctctgggccagcagttgcgggtgaatctaaccaggatggatccgatgatggccaacaggctatgcgaatcctcgaaatgatgcctgaatttgcctcgctcgaggctcgccttattgactggaagtgtcccttgtctgcggatatgtctttagcgctcttggctgagtcctatcgcagctcggctatgattcatttatatcgtgtcatgcgctgggcgtgtccggagcgacaagacgagcttttagcaatgactactggtcaggtcgccgcaattgtgagtagtgtttcacagatgccgacgcgtagtctaccggagtgtgcattgctctttcctctattccttgcagggggagaagccaccctagaatcacatattcagtctatccgacagcgaatgcttgatatgattaaatcccggttgtttcgcaacgtggaagtggcgctgtccgtcctggaaaaactatggcggctgagaatggtgggagaatcaatggaaccctctgtgcgaattgactggcttgatattgtacggcaggatgggatctatctttctttatcatgagagatttcatgaagtctatctccttggagcagcttttaatcatgttgtatgtataaaatgacacgagatctaccgcacaaactgatccgcaaagctggcgcccagaccaacctcctcgtagtgcttccgcgctgcctgaagcttgctgaagacatcctcaattcccaatgccttgccgtcaacatccacgtagatatacgcgcccgtcacgtggaacaaggtaatcatctcctgaaccccatcgggcacttccaaagtgtggatgtcgccggggggctcgaaggcatatccaccttcctcggcccaccaagggtgctcaagatagtgccatcgaccccgtagaacagtagcatggacgggtcctgtgtgtcggtggcgtgacaagattccgctcttcctgacgcgtaggatgttcacaaagtatccgtgggacacattgaagcataacggacgaaaccaaacatccttggcctgggggacccaaaaccgctcgtcacattccaagtcgagaacgccggtgactactaagtcgtcagggacactaggcagcttgggaccccgataagctgcggtggaaagatcgcccttctccattgtctgaacagccggcattagttagctagtgtcacaggcgttttatgtaatcgactgtttaccttggacattttggctttgtgatgatatggtcttgatgtctattcggatatgtcggacctcgggagatccctaggtcttatatatacggactcgtcacggtacgtagtcgccaatcttccggcgttaagggcggcgaaaccaatggatacttcaactgcctccacgattgcactaaaatctacaatcttggaataacagggtgggcctgtgatgtggagtggtctttttctggcccgccttactgggaggttagactttcgactcggcgtcaacagcggctttttctagcgtcggtaaatgaagttagaatttgggctacaaggtgatgtgaagttccctcgttataaaaccaaataaattatcctgctatccaggggtttttctcaagctaaccgaattctctgatctctcactatttattcccttcgaaatggccaccgacgagttcgttgcacgttcccacatcctacaccgggcattctccgagcagcctgcgaagatagtgggcggtgatggtatcagtcttatcttagacaatggtgagaaagtgatcgatgctagttgtggtccatcggtatcttgtctaggtcacacccagcctgaggtttttgacgccattacgaatcacctcaaaaatgacatcgcctacgtttattccggctctccttacaccaatggcgcgacagaggagcttgctgatatcctcctcgctgagaagcccggcggtttatccaaggcaatttttgtcaattcgggtagcgaggcgacggacgcagcgctcaagctagcgatccaatactggcacgaacgtggccagcctcaacgcacacattttatctctcggaagcagagctaccatggtaacactatcggcgctctatgtgtctcgggccatgagtcgcgaagagaattttacaaggatttcatgtcatctaatgtgtcctttgtggacccttgctacgcctaccgcatgaagtgggagatggaatcgaacgaggacttcgcgcaacgcttagctcgtcaatttgaggatgaaatcatccgcgttggccccgaccgcgtcgcgggcttcatcgctgagactgtcagtggaaccactctcggctgtttgcccgccgtacctggttatttcaaagccatccgggatatttgcgacaaatatgaagttttgctgatcctggatgaagtatgaccccgtttcttcttccattaaggtgctaagcgctttcagttaagcgcaagacggtgattgactattttacagatcatttgcggcatgggcaaaaccggcactatgcacgcctgggagcaggagggtatacgtggtcccgatattcagaccatcggtaaggccctcggtgcaggatttgtcccgctctccggtgttttgctccatcagaagatattcgacgcgttgtctgcaggctctggtgggctcgcgcatggccacacattccaggtatattactatgggatgcacagttgatggctgaaactaaattggttgttaggcccaccccctggcgtgcgctgctgctatcgcagtacagaaaatcatcaagcgggataatttgatcgaacgagtggcggaaatgggccataaactcgaagcgcttctctatgaagagatcggccctcttccactggttggtgatatccgcggccggggtctattctgggctattgagtttgtgcttgacaagaactcaaagtctgctttcttgcctcgggacaacttctgtggcaaggttgtgaaggtcgctctcagtatgggtttaaatattctcggaaatttgggccacactggtgaataccaggttgatcacgttctggtctgtccggcctacactacgacagaagtggagctcgcgaatatcgtttcgctacttagatcttctattttggagacgactcggcaattcgtcgtggcggagcaacctaatgaaatccccaattgcaaagtcaatgtgaaggttgctgaggtcgggcttgtcgagatatgaacaagagtagctgttcttcttctacgagaaacatgaagaagtccattgccaatttccaagggttttcatttagataatattctacatgtatcctttttcgggtgtttcaatttatttagggaatgatccttatcatagggaatgataccaatctggggtagcaatatttgagtcataagtatgactgtaaacactggcattgggtcctacaggaaatgtgtacaatgtcccaaaactcattattcaggcaatttggttccaatattgtaagacagatgaaacccatttgtgaagggaatatcggtaagtccctctatttcaagcctatggttctcttgttctcctgcgacggtattgcattcggaggattccccgcatttgtcggaggaagagcttctttaggcttagagttttgctagataggtccactctcgcctatttgggctgaaactcgttcctgtatttccagtcgtattcaaacattgaaagcaaacaatgtcaatccagacaccacgccaggcaccgagctaggcgccgtatcatggacgtggacgtgagacgaagacgggcccgtagaggtgtataagaaggaaaatacgtgtgtagagtacgtcagctaaaatgaatagttagaatgtattttttttttacctatagaggatataaaacaatggcaaagcccagaatataaagtgatgatatgaagacctcgcaggcctaggctcaaaaataatgcatacagagtatctcctttaggtaggtgactcgatataataccccatttggcggtcagctatttttgggacgcggcagtttggtgtttgggagcctcaggcgaatgcgcgacgcgtcgacctcatcgcacttgcctcgcctcaaccttgggatcattgtagagctaccaaagttggtgtatttgttttatctattttgggataaatgtaagtcctcatcttaatcgttttcaagtccatatgctgacatgcctggaaggtatcgacaacgcccggccggtggcgacgacagcgtcaagactcccttacaaccgaaatctgttaatactcagaactcgatcgaccgacttgtaaggccatttaagtgtccagggagtgcaacacctactcgcgcatctgagaaaccatcaagaaagagacgaaaggtcaactatgccaacgccgacgggagcgtggaagatggagcggagaagccatacacgaatgatgaccggctcgctttggaaacaagagaggccaacagattccccgcgtataaaccgagggacaaagatgtggcgttcaggtcacgatttcaggttccgttcattaacaaagccaccggcgaatacagttccggtcgggtggctccaacattggggatgcgacaaggcgcgacatttgtggtcaagccacttcatgaccccagtggagaatttgcgattgttctatacgaccctacagtagacgacatcgaggaacctgcgcccaaaaacccagaagcaccgacggaggatacaccaacattggatgagccaattatacataagagtctagcagacattctggggctcaaaaagaacgtggaggaaagaccaaaggtgcctgtcgtgattgatccgagactgtgcaaagtacttcggcctcatcaagtcgagggtgtgaaggtattgcgctccgagataagctgtgccatgggagaagagctgacactatgcttacgtatagttcctttatcgatgtgttactgggctggttgacaagaacgccaatggatgcatcatggcagacggcatgggacttggtaaaacggtaagattgaccaaccatgtttcataccttgcttctaacgaacacagcttcaatgcatcgcattgatgtggacgctactcaagcaggcccccgaggccggaagaactaccattcagaaatgtgtcattgcatgtccgtcaagtttagttggtaattgggccaacgaactgggtgagttatgcgtaccctacttcttattaacttgactgaccgtatcagtaaaatggcttggaaaggacgccaccacgccttttgcgatcgatggaaaggccacgaaggctgagttaataacacagattaagcaatgggccattgcgtcagggcgtggaattgtcaggcccgtccttattgtgtcctacgagacactccgtatgtatgcggacactttgaatgataccccgatcggacttcttctatgtgacgaaggtcatcgactaaaaaacaaggaaagcttgacatggactgctttgaataaacttaatgttactcgccgagtgattctttctggaacccctatccagaatgatctgtctgagtacttcgctcttcttcacttcgcgaacccgaaccttctcggctcccaggccgatttccggaagaggttcgaactaccgattctgcgaggccgggatgccgcaggcacagacgcagacaagaagctaggagatgaacgcttactggagctctctgggattgtcaacaagttcatcatccgccggacgaacgagctcctctccaaatacttacccgtcaagtatgagcatgttgtgttctgcaacatgtcacaattccagcgcggtctttacaaccatttcattaagagcccggagattcaaagccttcttcgcggcaaaggcagtcagccgctgaaagccattggtcttttgaaaaagctttgcaatcatccggatctgcttgatctagcgaacgaccttccaggatgcgagcacacgttccctgaggactattcaccacccgattctcgaggccgcgatagagaaataaagagttggtactctggcaaaatgatggtgctcgatcgcatgctagcccgaattcgacaagacaccaatgacaaaatcgtcctcatcagcaattacactcagaccttagatcttttcgagaggctttgccgggcgcggggttacggctcattgcgcctcgacggcagcatgaacattaagaagcgcacaaaactagtcgacaagttcaatgacccagagagtccggaatttatattcctcctaagtagtaaggctggcgggtgtggattgaatctaatcggcgccaatcggctggtactattcgatccagactggaacccagccgctgaccagcaagcgttggcacgagtgtggcgagacggacagaagaaagactgtttcgtctaccggttcattgcaacaggctcgatcgaagagaagatcttccagcgccagtctcacaaacagtccctctcgtcatgtgtcgtggactctgcggaagatgtcgagcgtcatttctccctcgactccctgcgagaactcttccagttcaaaccagacactcggagtgacactcatgacacattcaaatgcaaacgctgccggcccgacggcttgcaatatatcaaggcccccgccatgctgtatggtgatactagttcgtggaaccattttgtcaatactggcgagaaggggccacttaatcaaatccaggatctgcttcttcgtcaagagagtggggagcaggatgtttcggctattttccagtacatcagtcactgatacacttatttggcatacttgggcaggttcggagttactacattattgggcacattgtatctttggagtgtattcatttgggaaggaacaatcatgaccatagaatgatttgatgttttgttgtatcatcctgccgaaaaatgataatatttttgcattcaagagcagtaggacttaggtacttagcaacgaagctcaaagtgctctatatatagccttgctgggccgtgcgcggcacttggacttgtaccgtgaaccaaagctggcgaggcagagttcaggcagatagatggagagaatgcagaccatcgaaggttaaatataaaaaagcgatctatacttcttatgtattctaccgggtctatattgtacatcttagggttataagccagcgtgtctactccccaccctctcttatatatttctatcgtctttctatatatcacactccaccgagaacatagaatcatagaatatagtcatcctcccctacagcgacgattctgtcatcccaaactaatttccgtgtaaccgagatgactatatatatatctggtaactacaggtgtaacatcatactatagggtacgatccgccgttatatgatcgcacatacaggtccaggacacacccccgctatttccagcttctatactgcgtagtgcatcaatgaaccaaaggcccgcaatcacttcaggatatggcccatctgcctcggcccgccccggggatgctctactggtatatattcaccggcacgtgatgggccaccccactatggaaatctggggagcttggaatcattaccgtttgtgtcaagaatcttcaatctggcccttggagctgacatctcatggccgcagacttctgggctggctacatcagcggggccattgggatcatcatcggcaatccccttgatgtcatcaaagtccggctgcaggcgggacactcacatgcagatgcatcgcgggcacaattgagccgcttcgaaaaagcaagctctcttgttcgaggtccgtgccaccccgattcagcgataccgatagcaaaatcaattgaccatcgttacaggcgcggctgctccgatcctaggctatggagctctcaatgcgattctttttgttgcttacaaccgatcgctagcagcattggacgggtccgtaacggatcccaccaatcccgtgggggtctcggcttacaagatctggctggccggtgcggtaggcggactggctagctggaccatctcctcgccaacggagttcatcaaatgtcgggcacagctggatcgccggccagatgtctcgtcgtggacggtcgccaaggatattttccgaacgcgtggttggaggggtctctactttgggggcttgattactagcgccagagattcgattggctatggattctagtatggaaccaacacgccactcccggctaccccagtgtatcaatctaggagatctagtgctgacgtagcgcagtttttggtcctacgaactttgcaaacgatttatgacctcccacgatgagggttctcaccaggctgctttgaagattctgctttgcggtggcattgccggcgttgttacttggggctcggtgtttcctttggatatgatcaaaacacgactgcaggcacagacaattacggattatgcgcctgggactgagagccaatctctgttacgttcacagcgccagacgttgaattccttccagattgcgaaggaggtctatcatgtcgagggtatcaaggctttctatcgtggccttggagtctgcagtgtcagagcgttcattgtgaatgccgttcaggtatgttttctgctcgttgtcatgaactaaacaactgacatctgctagtgggcggcatatgaatggttgatgaagagctttaatcattcctgggatgcgcaagtgacaagccaggagcccatcgcgggcctgtaaccaccaccgaggttagaatatagaagatctaaaacacatcaacacagcagcagccaagctacgcagttaccggggtccgatttaggttagattctatttggtattgaggtatttatattggaattactcggtagtattgctagtaagggggtaaatttcgcccagatgttgtgttttcgccgatagtcggcagtttcgagtcacccgcaaaacggaagagcgaaaccccggcgagtatcggcaatataaaaaataattgcctcacgtgatactccaccgatatgcatgaggaaagtcatcagaatgagtctagatggattgtcctggaaacttttgtatgtcgatttgcgtacatcgattgctggaaagggtatcatggtcgcgtggcaaaggtttgatttttatcccggaaggcgaaggtcaagcttcgcttcactccttcatctcgtcagaattttcttcgcgcttgccgttgtcgatgagacctagtccgatcgcacgctcggcaagcaattggctgtgaggctcatcgcgcaggatgcgaagtctaagggtagctagttagcgatgggatatatcatataagacaatgtgcgtcgggcactcacctccgcttgtggttctttcctcgggcgtgcgccttgaggttgtagtcactctcaaaccatttggcgcactctgtgcagtagaacttgcctaggccaggcaggtcctccacatccttcgagtccttgtacttctggaggtgacggggagttttgatatccgcgacgacttgatcgtagtctctgtgggtgggttagccaaaaataggtacacggacaacccctatgccagacgtaccttgtgcggcgcttgttcttgactttcctgagagcacccattgtcacggatagccgaaatatctcggagctggagccgagcagtatcaaaatagatgcaagggaatgaaaattggttatcaccgatttccggagtgaacgaggtgcaaagcgggtcaagagaggcttcgaacaacaaaagcgagtgttcgagacgaaatttccgccgattgtgggtcctggccagcgattgaaatgcacggccgctgattggctggcgatcagagacggcaccttgatgggcgatgtgggattgccgttcggctcacctcggcttagttgatttcgtcaccgtacatcgctgtatttaatgacgtttgcatgaggtatgtggtttgcgatatgtaattcgagtctacgggttgaatggctacttgaatatctacatagataacgtagatctaggtgtcggatatactataggatctgaagtcctgtccaggtaaatctattaatatagcactatatcgtggcatcatcgactagtaaacagatgttgatcattggcgggcctcatccctatgaaacccatcaaatccacatgtacgtcaagctatcttttgacggatagcacggggtacaggccggaagagttacctgaaggcacattgaccattccagagccctttggtccgaaatgggagagctgggcgaaaggggccatgtaattggaaactcgctgattggtggccgagttatacccgtcacatgccttgtatcgagattacggtcccggtacatccccaggcaaacacacaggccacgaaggttgaatatgagaacttcacatagggaagacaatatggagagaaaaaagatcggctatacatcctacgtatgagctattgtctagggtagtaaatcctgaaaaaaatccagccaaatctcgagatctctcggctattagcagcctctatcaaattgcccagcccgtcttgccgtcgcatgcggcaggcttactttagtacaataccaacgtatcgtatcgccgtggtaacagcggttacggctctactcccggtccccgtagaacctttctcccactcaaaaccaagctttaatcctcttcttccttttgatctcttcttttctcatactactctccactctcatagtttggtgaatagctcttggatgtgcaatcccatctcgtagagcttccatcatgatttctacacgcctcgcgcgcgctggtgcgctggtacgtcttccctccctcagctccagcttattattgccacatggcaataatcctgagtgccagtcgattcttgatagatggataactaacttgtcttgaatataggcccctaagttccgtcttgtaagcaacgaccttgtttccaggcttccaaaacatgtcgcatggcacttttgctggcgtgcatgatagctcggacatagctacacctgcagttactgacttttcaatgtttagatgactggaagccgggccttcgctactaccgttgaccccctcgaccagaaggttgagatgaccaaccacgaacatgtgagtggctgccagcctagcgcccagaacccggcgtggagtacgattccaagcaatagcgactaacctatttcatattagggtcactacatcaactacaagaagatgtccgagaacctcgccatcgtccgttcccgtctgcagcgccctctcactttctccgagaaggtcctgtactctcacttggacgacccccacggccaggacatcgagcgtggtgtctcttacctcaagctgcgccccgatcgtgttgcttgccaggatgccaccgcccagatggccattctgcagttcatgtccgccaacatggagcgtgtccagacccccaccaccgtccactgtgatcacttgattgaggcccaggttggaggtgagaaggatcttgcccgtgccaacgacatcaacaaggaggtctacgacttccttgcctccgctaccgccaagtacaacattggtttctggcgccccggctccggtatcattcaccagatcgttcttgagaactacgctttccccggtgctctgatcatcggtaccgactcccacacccccaacgctggtggtctcggttgcgccgctatcggtgtcggtggtgctgatgccgtcgacgttatggctggtctcccctgggagttgaaggcccccaaggtcattggtgtccgtctcactggtaagatgtccggctggaccacccccaaggatatcatccttaaggtcgctggtctcctcaccgtcaagggtggtaccggtgccatcatcgagtaccacggtcccggtgttgactccctgtcctgcactggtatgggtaccatctgtaacatgggtgccgagattggtgctactacctccatcttccccttcaacgaccgcatgtacgactacttgaaggccaccaagcgtcagcacattggtgacttctctcgccagtacgctgagtcgctccgcaccgatcccgatgccaagtacgaccagctcgttgagatcaacctcgatgagctcgagccctacatcaacggtcccttcactcccgatcttgccacccccatctccgacttcaagaacgctgtcaaggccaacaagtggcccgaagagctcaaggtcggtctgatcggttcttgcaccaactcctcctacgaggatatgtcccgcgctgcttccatcgcccaggacgccattgaccacggtgtcaaggccaagtctctgttcaccgtcacccccggttccgagcagattcgcgccaccatcgcccgtgatggtcagctcgagaccctcgaggagttcggcggtgtcatcctcgccaacgcctgcggaccttgcattggtcagtgggaccgcaaggacgtgaagaagggtgaggccaactctatcatctcctcttacaaccgtaacttcactggccgtaacgacgccaaccccgccacccacgcgttcgttgcgtctcccgatctggtcgtcgccatgaccattgccggtactctcaacttcaaccccctcaccgacaccctcaaggacaagaacggcaaggagttcaagctcaaggctccctccggtgacggtcttcccagccgcggctacgatgctggccgtgacacctaccaggctccccccgccgatcgctcccaggtcaccgtcaatgtctcccctacctccgatcgtctccagattctcgctggcttcgctaagtgggatggcaaggatgccctcgacatgcccatcctgatcaagtgtaagggtaagaccaccactgatcacatctccatggctggcccttggttgaagtaccgtggccacttggacaacatctccaacaacatgttgattggtgccaccaacgccgagaacggtgaggccaacaaggtcaagaactgcttcaccaagaagtacgacgccgtccccgccactgcccgtgactacaaggctcgtggcgtcaagtgggttgtcgtcggtgactggaactacggtgagggatcttcccgtgagcatgccgctctcgagccccgccacctcggtggtctcgccatcatctgccgttccttcgctcgtatccacgagaccaacttgaagaagcagggtatgcttcctctcaccttcgtcgaccccgccgactacgagaagatcggacccgaggacaaggtcgacctcctctgcactgagctcgccgttggcaagcccatcactttccgtattcaccccaaggacggtggcgccgctttcgacattcccctccagcacaccttcaacgagtcccagttggagtggttccgtgacggctctgccctcaacaccatggcccgcaaggctgctcaggcttaaatgcgcttctggtgtcgtgactccccaaccttaaaaccttcaagtgtttcggttatcgccgagacacctgtgtaaactacgttctcttgtgtgttgaacaattcagatacatgcttcttgaaaaccacggtgtcacacggcagctattggattagttggctattgcccgtgttctcttttcaagagcaggatacgaggagttgcgctctgggaaaaattatgatgaacttgtgtgtttttgtaggcctgtttttctcggccttgcgttgattcccgatatctgggtgggctcaatggatataactcttttgatttttacatcactgtctttgtatgttagaaatggcatacatacacaatttccttttgtttttttcaactggttcctttcatagatcgtagatgtctatacaaagtatctcaaccgtggtccgtcatagtagacagccatgaatgtcccagagtaatccacttgacacctcggaggctcggacacatccaaggctgagataagctaccgaggctcagtttctgccccgcgtcggttggacttcagtataagattgacctggacgccatcagactgtcttattccgtcattggttcgaatttagtactttgatattttcaagtccacctctacatctcattgcaaacctatactatcgaataagcctagagcatcttgcatgataagccacccatcagttgaatgctgatctgcacttcaggacagatataaagatcgggttgttgagaatcctcccttccatctactatctccgcctcattccaaaatatggcgacccagctcgtccagcttccagaagtggagcgccttagcgcctcagtcgtgaggattttaggcgggaatccggggaaggtgagtgcatagatgccatcaagtcagtataccacagcaagctgatcgatagcaccaacgcaatacagttcacactccaaggtaagcatctcactccctcccaaaacccagaagaaaacacctaaccataagccaggcacaaacacatacttaattggtcgcggccataagcgaatcttaatagacacaggcgaaggcaagcccacatgggcagcaaaccttcagtccgtgctctcagaagaaaatgcaatagtgcaccaggctctgctgacacactggcacggcgaccatgtcagcgggctgccagatctgctcagaatctgtccccaggctcagatcttcaaaaaccagcctgattccactcagacggatatccaggagggccaggtgttctccgtcgaaggtgctactttgacagcattccatacgcctggacatacggttgaccatatggtatttatgctcgaggaggagaatgctatgattacgggtgatagtaagtgcggctcttcaatccaacccttcgatgaaaatgatatacaatgtccctcgaaatatctaacccaaatctacagacgtcctaggccacggtacatccgtcttcgaggatctcaaaacctacctcagcagtctgcaccggatgcgcgaccgcgtcgcctcaggccggggataccccggacacggggcggtgatcgagaacgccggtgcgcggatcaccgagtacatcaagcaccgtcagcagcgggaagacgaggtcctgcgcgtgctgcgattcggtaagcttgatgtcgcggatggcgagtcggcgccggagcacaagcaggcgtggacgcctattgagttggtcaagcgtatttatcgggacgttcctgagaatttgcatttaccggcttcgcatggtgtgtcgcaggtgctgttgaagcttgaggatgaggggcggacggttcatgattcggactctgggaaatggagtcttgtgagtgagaagtcggctttgtagttgtatagctatatagttttattcgctatagaaccgaaatgggatctaactagatacgttttgtcttagaataacattcgacgtcagcactcggtcactcgtcttcctggctaggccatgttgtacaaagtcagaatgaccaaaagacgaagaatttactgtcgaaaaatatctcttttgaatcgcatagaaattatagcacgatatccccttccctttatatatttccctgcagtccatgtgagtgatagaggcccaccggtagttccaacaattccaggagtgacgttcactttccggtcccccgctttgccctcacctttcaccttttttctctccctccacacactcgccatatcttgtttggtattactgctagcaggtattcacctatggagatagattgctagtttggtgctcatccggagtcaatatccacttgttccaaaggttggttcgcattcgtcatgatctccaagggtttccccgcctccaaaaccgactctaatcgcatgttcgctcgaaactacagggtccactttgcttcgactacaacttacagcccttattctaatccaaataatcccatcctctgctttcgcccggcatccgatccatcaccatgccttccgtcgagcccaagcatgaagctcgcctgcttctggtctcaaaccgtctgccgatcacaatcaagcggtctgatgatggaaaatacgatttttcaatgtcctccggaggcctggtcagtggtttgagtggtctctcaaaatcaaccaccttccagtggtacggctggcccggtctggaggttcccgaggacgagatccccgtcgtgacacagcgcctcaaggatgaatacggcgctgtaccagttttcattgatgatgagctggcagatagacactacaatgggttctccagtcagttactcctgctccccgcaagcccttggaatgtacactgatattcgttcttccggatagactccattctctggcctttgttccattaccaccctggcgagatcaccttcgacgagtccgcctgggaagcttacaaggaagcgaaccgtcttttcgcaaaggctatcgcgaaggaagtacaggatggcgacttgatttgggtgcatgactaccacttgatgttgcttccggagatgctgcgcgaggagatcggcgatagcaagaagaacgtgaagatcgggttcttcttacatacaccgttccctagcagtgagatctaccggatcctccccgtgcggaatgaactactcttgggtgtcctgcattgcgacctgatcggcttccacacttatgattacacgcgccatttcctaagcagttgctcgcgtctactgttagtataccctacgcggcttgatgttcatatctaaccggaattagtggtcttgcaactacgcctaatggtattgagttccagggcaagattatcacatgtggagctttccccatcggtattgaccccgagaagttcaaggaaggtctgaagaaggagaaggtccagaagcgtattgctatgttagagcagaagttccagggtgtgaagttgatggtcggcgtcgaccgtcttgattacatcaagggcgtgccccaaaagttgcacgcgctcgaagtgtttctcagcgatcacccagaatgggttgggaaggtcgtgcttgtacaagttgccgttcccagccgacaggatgtcgaggagtaccagaatttgagggccgtagtgaacgaactggtgggtcggattaatggaaagttcggtacgtatttccctttggtgttctgaacgaggctaatcgtctttcaaggcacggtcgagttccagcctatccacttcctgcacaagtccgtcaacttcgacgaactcatcgctctctatgccgtgtcggatgcctgcattgtctcatctacccgtgacggcatgaacctggtggcctacgagtacatcgccacccagcagaagcgccatggagtgttggtgctttctgaattcgccggagcagcccagagtctgaacggtagtattattgtgaacccctggaacaccgaagaactggcaggcgcctaccaagaagccgtgaccatgagcgacgaacatagggctctcaattttgccaagttggacagatacgtgtccaagtacactaggtacgtcaccctatccctgccaagcagccatcctgtatctttcgtatctcgtatttggttcccgactgaccattctctagcgcattctggggccaatccttcgtcaccgaactcaagcggatatcagcccactctgccgataagttccaatccaagaaattggcggaaacggatccgagcgaaagacatgtgccaccccaaacgcacgcgtaataatctttttatgtttctcttccgagacatgttgttcccagtttcctggtgctctgctgtcggaacgggtatttcaaatgaaactagatggccttcacgaacatggatgaggcgaaatgtattttcttagaggttgtttggttctgcttctatttttgtcttcttaaatctgaattctgtatacaggttttccttctagaccagacttatacagagaacatatcccgggttaatgtatcttccgggtcggcgggagatctgggcagaatagaatatccccatacaacatatggccgtgatgaaggacatctattatgagcaaacgaatcagactgggttgtccctggggaagtttcttaaggctttaggctgtaactcgcatgctgttacactcttgccttttcccccatagagctgcctcatacttggtgagctaggcgagatcaatctttgatgtaatcagactattttacttgagcctggtcataaattgcttattgtgcaaagtgatactcaggaggtcagtcacgtgcatattctgacagctcattccagccctggaggatacatgtactcactaaacactccaatcagtgagcaattctgatcactcacctgccctaatagaaggccctgttttgttttgatcgtcttgtattgttaattaggatgactttagttcggcaatcatttcggaaaattaccccccctggatatttgttttgtccaagacggtccttctctcaagccatctccctcccatcacccatagaggaggaacaatgtcctacttacaatcctaagaaatattatcccgctcgcattggggagaccgttggtcggtatcgcatcgtttcgaagctcggctggggtgctagttgcacggcttggctggcacaagatgtttctcggttagtcgaacaattagttctcagtgccatatcttttctaaaaccgcgaagttggcgatttcagtcgccccgatacgtaaccttgaagatcacaaatctcggagaaggggaaaagaaagccacggaagaagagatagcaatctcgcagcatattgctgccttgaagtctgataatgaagctatacgatacgtccggttgatcaaagagtcgtttttggtgcaagggtctcacgggcaacatatttgcttggtattcgaaccattacgagagcccatttggtttcttggaagacaccctgggagagtcggcatgcctccaaacattgtcaaggcatttttgcggatcttacttcaaggtctagactttctccactccgagtgtcatgttatacacactggtgattcactaactgtcttcctaaaaatcgtgttgactttctaactggccgcagacctgaaagctgataacttccttattggctttgaacacgctaatgttatccaacgatatgtccgccagcaagagctcgatcccgcaccgcatgtatttcggaatggacggcttgtatatcattctagaccagactttgggccactgacgaagggggtgtgtttaataaagatctgtgacttcagcgctgccgtcttcggtgatgtgacaacaccacacaaccatgacatccagcctataccattctgcgcacccgaggtccttttaaaggccggttggacttatagcgctgatatatggaacttgggaacagtggtaaatagccaagagtgagagagacctatcgcatattggtgatacaacactctttggtgcaggcgcacagcattccctggaggcgcacgttgcgcaaatgataagacttctaggtccgcctccctcgcaatttctgaagacatgtgatccatctatatgtggtcgtttgttctcagcccagggtatgtttttgccatattccgagatatgatggactctgatttactcgcatgtgtaggggacttcaaatttcctgatctgattccatccgaaagcttcaatttctcgaatgtggtacctgctgtcctctaaggggaagataaacgtctttttattgagttcgttcgcaagatgcttcaatgggaacctgaatgtcggttgactgcaaaggaactttatgatgacccttggcttcatatgttgtagtgacaagggggtcacagctatcttgtgtacaatttgtctctggctttttagggcaaggtttattatttacttcaaatcaaatacgaggcaagccgattgggcactatgtggcattaactaactaccctgcacaatacatagctggccattcaagatatcagtaagccctactctgcccgccagcatattggctgtgggtaagtcaatctgatctggtgcatataactagctcatcatgcatgctgatcaccaagcagttcattatcccaccgcccaaatctcgaaatcccgttctgaacttctcacgacaccaaaagctgtagactaccaactatgccagaaactttccgtttctggactttttgtgtctccgaatgttccgctgctgctgcgatcgatgtcggtctctgcgaacgctgtaagcagcatttttgcgccattcacgccatcttagcaacccattgttgcaaggtacccgcatcatgtaaactccgactatctgaggcgttctaatccgaccctagaaataccctcttgacgaagatgaatgggcggctgcacaaacagaagaagtaacagcccttcgacacatgatgaacgacgaaatccttcggcgtcgagcttccgaacgcaacggaggcctcaattgtgaatttgatccctcagaccctctaggacagaagcggatgtgcggcatgcatatccatcttcgaatcatttttagcaatggaacggcctggcttgctcgaatactgcggcataactacacctcattctcagacgactttagcaatctctgcttaaagagtgaatgtgctactctgaaatggctcgaagatattaacgtgccgtcgccgaaactttacgacttcggtctgcggaacgaacccgagattaaggttggagttgcgtatatgctgatagaggaactccctgggacacctttacttctccctagcccgtcggaggagcagttgcgaaaactgtacaagagttacgccgacatcttgtgcactatctataagtaccccattgaccaaatcggtgctctctctttacaaccagatggtactatctgcataggccccatcgtgggcgatcgctcaggtacattttcgcagataggacctttcagcaatgcacgagaatactacacgacatgggcagagaaatatctcgagatgatctgcgaccaccagcttttcacaccgtactctgtcaatgcctacttaatcttcaaatacctcaaggaactggcgcaacaagggcagtggaatgcgtttgaatcgagtatcgacaatggccccttcttcttaaaacacatggatgataaaagtgaccatatacttgtcgataaggattacaatgtcactgggtttatcgactggacgtttgctagggcagtgccgatgtatgcggcatttggtccttcactgttgacagcagatatgaacgatatttaccaaggcaaggctgggcatccccgggtgacagaatcctggccgaggctatacagactagggacaagtatttggctcgctttgtcagtggccctgacctggttcgccgcttctcctttgctctcggaatgggcatgtgtatgtcttgggatgaagcagttgatttgttccgaggcctcatatctacggctgaaggtatcggctcggagtttgactgggatgtctggcgtcaaaatcgtatagctcaatgggctggtgatgggaggttgcaagcccttctgcttgaattgggagaaatctagaatctcgatatttgaccgaattgagtgagtagcagcaagatcacaaaaatttgattctgattgtcgtgatggtccacaagagatatctatgagagccgaactccgtcgtattagatattttaaagacttgcaaataatcagaagtgtacatacaatttctgaaataaaatatgaaggtttgctatcaaattgccctgtcagtcgacccatggatgtcttatactatggtgcaaacagtgcaaacatgcttccccgagaaattctcgaaatcctcaactgcaaacacctcaagctcgcaaccatttgggcggtcaccatcaccaaccacctgcttgaccacctctaattactcgtcctctccaattccacccaactacaattggaagagcaaccgcctgctcccccaccaacaatggcaccaagccatctcctccgggcaacaatgcctctccgagcctcaatcacgacacctctgtccctgtcacgcccctcaattctccaatcaatcacatacctcaccacgcccctccgcaatgcctcaacaactaccccaacccctacacagccgacgaccaccgggacagaaacaaaagcgccctcccgactgcgcaaatacgcctcagccctgaagaccggcaccgtagtctccgtcggccgcatggaccgcacagtgggcgtcagccaccgccacaccctctgggaccgacacatccgcaagttctaccctcaggaaacgcactacctagtgtccgatccccgcaactcgctccgcaacggcgacataatcgagttctcgtccggcgcgccgaagagccgaaacgtgcaccacgtcgtcgagcgcatcatcacgcctttcggcgatgcgatcgcagaccgtcctcctgtgctgtcgaaggaggagcgcgaggctgagcgtgagacgcgctgggcggctaagtatctgcgtcgtgagtcgagacggcttggtcgcgaggtggatcttgtggaggaggccgctaaggcgggtgttccggtgcctaagggtgaggtgctttctactgcgcagctgattcatcgcattcatgcggagaatgagcgcgtcgggaaggttaagaagcttgtgcaggagagactggcggaggctgagagggttggacaggagagtgtgaaggaggctaagcaatgagcagttggcttctactgagaagtgtacgtttagctctttttgggacggacttcagtatctgaattgccggatttgtccttcggcctctgtggtgttgcatatcggaggtcatgtactgtattataccgcttcaatctattttcattggcattgtgatatgctgtattcctggggtggattttccaactaaaaaactaaagataggctgaagtatgtatgagaagaaggagagccatcaacatcaaaaaaccaaaaaaccaacaatggacatcgtaaacatgggtttagcctagacggaaccgtctattccaatccctaatcatttggaaacaaaaaaagaaagtcactggtatcatggaagaataaccaactcctttacccagaaacggcaaactatgcccgccaaatcccgaacccaccccggcaagagacgcagtgctccccctagcattgggtgttgcacggcctcatcttatttccattgctcgctcgaacatcatgccgcccagacccggaccttgagatcaacactgccagtggccagaacacatcgaatggacatctttgtcgcattagggtcttccttcgccccattagacgcagccggggcaccgttcgtaccctcctttgcaccggcatccttgagcaaaggcggtgcccaccggagcgaactgataaagtggtcgtgggccgcgatcgtacgcacacacttgcattcttgcgtgagatcccagcaccgcatggtcttgtcgtcagataccgagagaaggtatttcccgccaggatggaagaccaatgagcggacccagttgtcgtgaccaacaagggttttgatgcagtttccgcgggtatcccagagacggatagtcttatcgcgagaaccagtagccacaaactcggcggacgatgatgctggcggtggtttctttagccccgcaagagctgcgaagtgagggtagcttgttgccggagcgaaggctacacactcgatataatgttcatggcccaggaatgttgacttggtatcaccagacgagatatcccacagacgtgcgactcgatcgtctccaccggagaagaggaaccggccgtctggggatggtgtaacatctcgaatccagtctccatgtccctgcatggatttgacacagtatccagttgtgacgtcccaaatgcgcagtgtgagatcgcgagaagccgagactagcaggtttcctgacatgggagaccctgcagctccggatggaatgaaccgaattgctgaaacactgtggtcgtgtcctggtagggttcggatgttcttatactcgtcagccgggtcccacaatttgatcgttagatctgacgagcatgatgcaagaagtgtgcctccacgcggtccaccataatcgacgtctaacactgccctggtatgtcctttgattgtgcgctctagttcacccagctcccaatcccagatcttgattgtggtatcatcggaaccggaggccagtgaagagaatactggatggaaagcgaggcacgatactggcgagcggtgtgattggaggtcatgacgcgctggtgctcgaggcagccaggtaacggggtcttggtttttgcgattcagcgaagtcggggttgcggtatccagctcggactggagtgcagcgcatcgtgcttccagttccatgatctataccaccattgcaggttaaaaagatgtagacgtgttggtatgcccggtcgtcgcacctttttctgtaaccggactacactcgtccatttcttctccaacaggccttcatatttctttagtgtgctctcgtcgaccctgatcgagtcgcccagttcttctcgtaaagcggcggagctgtggtgcaaattcacagaggtaaggtaggcgatcattcctttatgtctgtcgcaaaacaccatcagcgatcacccctaaaggaaacagatcgggtcacatacagctcctccgcctgccgcgttgtgagaagttggctcatgatgttatatgtgctctctgttctctctgctcatccaaatgcgcatataccaagttggttcggaaaactgcgatggagggggagtggtgtgagcggtgtcgaggggagtcggggggagttagagggaggttagaagttggcaattgaagaattgatccaagagaagtaagagaaaccgaagaatagagagaaagagaagaagagaagataaatatgaagggcacgttgtgatccaccgcggggaggggagaacaaaacaatcttcgccaaggcttttgtttactttcctccaacttcaactgttgattttctttaactcctgttggtttcgactattatcagccactcctttcaatatacaatttggcactttgactgagatattcatgttctggtcaagatcagtgtcttattaaagcaagacaagtccgtctttgataccctttgggcatcaacccaacacagtacgaccatctgaaccccccgagacaccccggaagagcccccgcaacaccaactcagagcctttatatctgtccccggaactctctttgatactatgcgcacttctgctcagataccgcagaacgtgctgactcctttttttcctagaatccgttgataattcccgcccgtcgttagaatggctgaagtcccagaggatttctcctccttacccttgcccgaccggttcactcataaggtgcgctcatccctgcataactagcccgaccgataggattacggaaatctgactccgatgcacagaactggaaagttcgaaaggagggatacgaagatgcgaaagcgcaatttgaaaagacccccgatgaatcagatccgattttcggaccattcatacaagatcccgacttatggaaaggggcggttgcagattccaatgtcgcggcacagtctgaaggtctggcagcatactgcgcgtttttgaagttcggaggagtccaggcctgtacgaggtgcgtcaaccccgatcccagtcgcgacgcctgaacccgctgacaacattcccatttacaggagccgcacgtatacaattggtcctattgctgagaagggtctcccatctacacgaccggccggtaaagcctgcgcgcaagaagctattttattatgtgtcgaattagacaaggccgatccagtgatcgaggagctactacctatgctatcacacaaagtacctaaggtggtcgccggatctctcgcagttttcaccctcatttatcacaacttcggctgcaagattgtcgatccgaagcaaactttgaaggcgctgaccaaggtttttggtcaccctgataagaatgtccgcgcggaagcacaaaacctgaccgtggaactctatcgctggcttcgggaggccataaagcctctgttctgggccgatttgaaacctgtgcaacagggagatttagagaaactattcgaaactgtgaagcaagaccccacgccgaagcaggagcgattcacccgggcacaacaagatgccatggctgcggccagcgctgcaccggcgggtgaggagggtgaagtaccaactggggacgaatttgatgaggaggaggatgtagtggttgttgatgctttcgacctggcggaaccggttgatgttatcaagaaagtaccggaaaacttccatgatcaattggcctcgtcaaaatggaaggaccgcaaggaagcgttggacgctctctataatgtgcttaatgttccccgaatcaaagatggtccctacgatgagatcgtgagggggttagccaaatctatgaaggacgccaacgtcgctgtcgccacgatagctgcgaactgtgtggacgtgttggccaggggcctgcgcaacggatttaccaaataccgaagcaccattatgtcgcccatgttggaacgtctgaaagaaaagaagacgactgtcgcagatgctttgggtcaggcgttggatgctgttttcagcacgtcgacccttacagactgcttggaagaaatcctcgagtacctcaagcacaagaacccacaggtcaagcaggagactgttaagttcttggttcgttgcctgcgtacaacccgcacggtaccagccaaggcagaacagaaagcgatcgccgatgctggtacaaagctattgaccgagtcagccccggcaatccgcgaaggagctgctgaaattctgggtacattaatgaagatcctgggtgaacgggctatgaatccgtatctcgatggactggacgagattcgcaaaaccaaaatcaaagagtacttcggaaccgctgaagtcaaggccaaggagcgacccaagcctattgtggcacctccaaagcctgctgccccggctggcaggaaggtcgttggcaagaagccggcaacggggctgaaaaaattagcccctgtagctgctccacctgccccagaagaacccccggccaggccagcagccagaggcgtcccttcaaagctcggtgctccgagggccggcggccttccaactcctggatcaggtctcaaactgcaacggaaacttgctggccccggaagcactgcgtcgccggcaagacgagttgctgcacccccagaggaagatatggcccccccgccagcagctcccaaattcggtcttggccgtggacttgcgggtcggcctattgccagaccgtcggcgcctcttgagcctcctgcccctacccctgccgccaatgctttggcagatgccgagcgtgccgagttagaggaattacgggcagagaaggagaacttcagccgaaccgtggaagatctgaagtcggaacgttcgaggctcaactcaacgatcaccgaacttcagaatcagaatgcacagttgattgaggaccacacccgcgatgtcttgagcatcaaggctaaagagactcaacttgttcgcgcacggagtgacgcggaaaccgcagagggaagtgttcaaaaacagcagagagagatcgaaagattgaagcgtgaactcgcgcgagcacttcgcgcgtctgccgtaagcccacctaacgctggctccgacgcaggaagcatgggcatgccagacacaaactcgatgtatcaagatcacatcggcaatggcaatgctgcttcacgatctggtctccacatggggtcccgcttcgaaagctcgcgtcctcgaagctatgcctctgccactcccagtgaggaaagggagaacaacgggatggaatcgccaggacccagtagtcgcaatggcggcctaggccgacggaacttgagccctacatacaactactcggccatcggtagcccgacgcgctcatccgtccgaaactccaatacaaatttcaacgaagacgatcagcagcacccccgatcttctgaaccagcagagaattggaagcgagccgcagaggtcactagtcaactaaaggcgaggatcgaacaaatgaaggtgagttgattgtttatctgattacgtatgtcttgtactaacaacaatgcaggtacgccaagggctttcacgacctcctcaacgttaatgaccaaatgaccgcgatcacgtttatgtctcgtccttcttcatgctatacaccttcttcgcttcaacctgtgtctttagatggggtttctccgtgtcatcattcatattaaaatcggcggtgagcatatctggtcttctgggagcatggtggctggctgagcttttgggtttctttgtactttttcttttttttttcctctcttagctttggccttggacctctgtatcttgctgtaatttcatcataccagcctcgtgttctcttattctgctcatggatattgattcctagtatttagtgtaataaagctgttattgctatcttgctagctctctctctctctctcgtgtcggctctatttttggaaacataagccgtcgccttctatgactggcctgaataagtgcccctcaatgatgtgacggtgaatgagtgctgaagtggcactagtggacgagtataaaacccactaagactacccctccttccttaatttcttcttacttctcacatccctcttcacatctcctcttacccctttacttcatatatcaattcacaatgggctggttcgatggtgactattccccttatactacctcgataccaaccttcgactaactcccatctctagatgactccaaccaggctcaggcctacaacaccttcaacggccagcaagagcacgacccctccgtggtccacgagctgattgccggtgccgcttcctacgaggcagccaaggcctacgagaaccacgttgctgagaacggtacgtagatagccccacccagctgagccagagaaaaagctaatattaatttggcaacaggcgagccccccagccacgagaaggccaaggagatcctcgctggctttgccggtgcctttgtcgaccgtgaggtcgagagccgcggcttggacttcgttgatgccgagaaggccaagtaccaggccagacagcaggtcaacgatgcttatgacaacaacggaaaccagttctagataacgaccttgtgggtgtggcatgtggatatattgtctgtatctagtccagttatgttgtatgtagcatgtgccggagatgtgtttcaggggggaataacccctcaatttcactctcacctaccgtattaccccacctgatcttgtagtgttgttaaatcttgaataaacggtctgcttcttcgatgcaggtccgtttgatagcagtacatgtatgtatgcagatgatatgtgccaagacgggactatcctttagaaaaaagacttggtattcttggcaggtgtcaggtcgcatgaagtcggagagaagggagaaacggaaggggagaaataaattccccgattcagcgaaatgtcggtcaagagaatttttaaccaccgtctgcctgttgactctttagacagattacattaacatcatacagattaactacacttgacaagatcatctactaatttactacaatacgaagcagacgacatgaatgcctagttctgatgggctacgaagaccatcaatagattgaacaggtagaaaaatgcattcatgggtatctgcagaaaggtggtacatgggagttcgtgagagaaaatgtgtctttttttgttagaacaggatccaaaaagtgccaaaaggctctttcgcacccatctaaagctaaaagatttggccgtcaatagatcgtcaaagccttggaacaccttgtcgtttcccataacaacttattatttttgagcgcttcgattagaaacgatcccgtcaaacagacatcaaagaaaagctgtagttacacaagcttaaaccttgatggcggcatcgagagccttacgcttcttctcgatgcgggcgttggccttggcgcccatgataccaccaccccagtggcggcgggagtcctcgtgcttgtcggtgtaaccctccttgatggcggagaggagcttggcgaactcggccttgtcctcagcgcgggtctcggtcagggcgagaacggcggaggtcttcttgtggacgactgtgccgagacgggccttgcccttgacaatggcgtaggggacacccatcttgcggcagagagcgggcaggaagacaaccaactcaatggggtcaacatcgtgggcgatgagaacgagggaagccttcttgttctcaacgagtccgacgacgtggttgagaccgtacttgacgtggtagggcttcttggagacatcctccttcttcttgccgtcggcgacggcggtggcctcctggacgagacgctccttcttctcggccttggtctcaggacggtacttggagaggagcttgaaggtctgggcagcggtgttgcggtcgagagtggcctggaactgagcgatggaaggaggaaccttcaggcgcatgttcaggatcttcttctggcgctgaagacggacatactcgggccacttgacgaagcgggagaggtcgcgacggggctggatgtcctggccgataccgaagttgcgagtgcgcttctcgataagggggttctgtggggggaaggttagcatcttccaatgcactcctactgggaagaaggaaaactaaccttggcagccttcttgccagcgccagccttgccctgggggtagggcagagcggcggtcttctttccggacttagtaggaggctatcattgaggaagaagatcagcgtgctgttcacatagtgctgcatcttctttgaactctaaggagaacatgagccaagccgtgttacgggcattgactccatgcttccagccatatcatcacacgatgcacgacacatctctttcgaggctgtgcgcgatcggcggaattgcttagatcagagatctgaagcaaagcgaatatcgtgagacatcgcgagagaactagaagaagcctctgatgttatcaagagacaatttgggtactcaccaccattttgtcgactgggattgcgctgattgacggttgacggatgagaaagggaaaagttcgtgtggatgcaccttatgaagtttctgtgggtcacgctagcgcagtcatgtgattagggcctagggcaaacggttagggcagatatactcggccacgtgacagatcacatgacatcggatatctcatattctggcaggcgcgctgagacctcaggctttaattcccgtaaacaccggaaaccccaaaatcatctgatatttggaccccttttgatttctcccaaaatcgatcgacttcgattgagacgatgtcgaaatacagtcttctattccaatgataggacgctaatcatcgggagtacggaaagatcgccgctactcttctccaactctgaattgggcatggcgcgtttctccagggctacgtggaccccacaactggcaagactttcctatgatgtactaccccgttttcgagtgtcggaaactaataatgtatcgcaatatagcaaaccctgcaagtatcctcctaaggggagcaatccagacgtgaacgagaacccagctggttcaattcggtctagcctacgactggattcccgttctcatagcccaactatgttgtactgagtcgggcaataccaactgttcaccaatttcatttcttcttccacgtgcaatgcgtggatgataacggcacaatccgcatgggactttatgtttcacgaattccaaaaaatacgtgaaatttcaacgagtcaacccgctcaacctttccgatgactcgctgtcggtgacgcgagaagagaaccaataggtcatcactaactccttggagataggttcgcacttttacgctcgactaaagcaattttatttccgaccgactctatatttattgcattgacttccgacttacccacgaaagagtcgaagggcacgacgcaaaaaaagtctagaatgcattatgcctgacacacaatatcaaccaatcgcgtgcataatgctagccctcctgttttctaggagtggcaaggctgattctccgtgggtgaattatatataaagtctttgagatcggtggagcaattcagcttcaaggtttctcttagtgctgggagtcaatatctctactccttcgtcggtatctcacaaaggagtagatcagccctgcattctacgaaggggcatcatgtgtctttgatacaagcacattttctgttgaagagaaaattgtggaggtcgtcgcagaattgcgaaaagcaattcagttctagcgtggtctcctatgaacgcagcagaaggagaaatccttaatgaagtttttctcttttcggtttcaccggaagcattttgccaacgcgccacaggaataacaaatggcggggatacttttccgaaatactgcctaagcaacggtataattctacgacacttttgtttcacggagctactgtgggggtagtacaataatgaatccctcgcagtgagttgaataattgtattatatttattcatgtaccactgactggattcccagggataacgagcagaagcttccttagttatgtcatcgcgggcgagcatccgggtccttttgggtggccgtttcccagatctttaggcaataactacagattcactttccagaagattgagcttttttctgcaacaggtttgggcacagaaacattgaaaaggtttgcgcgtatgggctgtttagtacatgatattccacattactggttagagatgcgtacagactatcttaaattaaagactcggagcttggggcgatttcatagattaactgcttttcctcaatatattactccggcactactaccggtactgctctaggagaccctcaatgcgtactatttcggatttgaaccagttggcgaggcgtggatcacctgatacctgaattagactcgcggccatgttgtattggtatctcatttgcgtcaacgccgagaatgcggtttcctggtaggaacgaccgagttcggcggtgaaaagaggatcacagctcatcagacgccaacggcttaaatcggtaaagtactctccgacttgaataacagtggcgaattcaaccgccaggtcgaactggtttttgcctagaggaatggccatgcggacggcattccgaagaccgggctctgactgaatctccgattggatatgcctgagggggttgcatttgatggagccttgagtgcaaatattgcagtcaaaggaggcttgaatacgcatagtctatatatattatgttagaataccagggtatctagaatgataagagatactgactgttagaggctccatcttcaaaatgcagtgtcttgatattccacaaagctcatactctggtgcacaatcaggattcggagtgtatacagccagtaaatgagcctccggcaaaggtccagagacagtgggtaggtcaggaggcgagggccagtagatgaagagaatgagcgaaaagagaggggggccagcagaaatagagaggggtcagccgagagacagggggccagtagatacagagagaagaagtcgacaaaaagagaggggttcggctgaaagacaggggttgacttcatggtttttcttttattggacgaaaatgaggatgccagctacgtccgatgcaagcccccgtatggagcgaatcacgttaagggccaatctgcgagaaccagccattcctcgacgtcccgccagcttggaaagatcaggccgaggactttcttcgagcgtaattccgtgaatttaaatccactcgcatttagtatatgaacgtacgacttgggggtccatacttggagtagttctgtgaggctcgtccgcgacgtaaggtttggattgacatggagtgccggaatggtgctagtggcttatgcgcttcagccctctagaagccttctagacacttttagggccttttagggccttttagagccgtttggggctatggtttggcttgaaatttaggactttactaacagctaccacaatgacccacttcgaatcgtataaatagttacacccttactatatccagcggtcgtggctatgccacgtagtaggctaaacccgctctttgccgagtggaacgtcttctaatatattagctataacggttcggagaataggctattgcagatagtccttctagcggatttccatgggcattctattggaaaggttaactaggcgtccacccgtttcgatactagcgaataccgggatagggcgcgcggctatggttaggagaatgcaaattgtgggctgatcgtagactgaatgtttagcagattcctctacctttgaacaatagtgagcctgagttgttcggacttccgggatgaaagttgtttccggagagttgcttgagaggagaagggaatatgctcatgaaaaatatgctcatgaaaaccggtttatatacatcgaagaaaatgggtatttggctttacaaactccacaatgtacaatcacatcactcaacataccatttaagggcattaataaccgacaagtatataaaacatcattcccaaatcctgccaagcaagtctagaatgcgtaaccagaacgccttggatagatcaaacgggacaccacggtcctcaaatccatcaatatgcaggtcatcgaagagaaagcatctgtccatagatcacatcacctccacgctcccaacccgggcaaagccccacgacccaaactggtactggcagcctgaacagcctttctcttccccaacgatccctcctgagcacgcacaccagcaatgatcttctctatatgcgtctcaaccacaacaccaccgacaatcatctcgccgagcaccgcatgcagggtctcatagccgaagatcagatccaactcgcagacattctcaaacatccgatccagcgcctcgacaaacacctgaatcagatcaatcagagcgagtggggactcggtcgacgtagagatcataatgaacgacagcgtcgcgtaggtccggtatgtgatttgggtgggggtatcggagggcccggaggcggtggagctggcgccttgcgagaggagaggagggagtgggaggaagttgcaggcgcttgctggacgctgcgcgactagacggtatatttgcgcgatcagggattgctgggtttgtgtgtcctgttcctggggttagtggtgtcctgcgacgggtgagggcgagggcgagtgcggcggggtatcgactcaccagctgtgtgtagaatttggtcagccggggttggccattgttattgaacacgaggactgcgttgatcattttgactgatgtgaggcttggaacatgggcaagctggagagagtgtcagtcttatctggatgcgatagctgatgatgcggttcgggagacttgccccgtgcgtcgatctggagaaattgataccaacatctacatttttttttattcttggctttttgtcaaccctttgttgggtgttcgcgagtcataatgaactcaataccagcatgcaggaatcctgcatctaggatatcattatatacaaccatacgggccctatcctcggcctctaatccccactccaagcgcgaactcaaagacctcaccccgaccgacctctgctactactgggataccagacccccgaaagaggagcaactagcctttgccgataaggtattcacgccatcgcgtcactcgccgctcaaactctggtccgccgccaaattccgcaccacaccattcgcatcagtcgagccggaagtcgcattcttgggccgctcaaatgtcggcaaaagctcactactgaacgcaataatgggacaggagatctgctggacatcgtcgaaaccaggccggacgagggaaatgaacgcgttcgggattggaggtacaaagggcggcgagtcgaaggttgtgctgcttgacatgccgggatacggaaaggcgagtcgttctgagtggggagcggagattatgaagtatctccagggacggaaacagtgagtcatgatgcctgtcaacctaccgacccatggtatgtacaatgactgacaaacatgttatagactccgtcgcgcattcctccttatcgacagcacgcatggcatcaagcaaacagacgccgaaatcctcagactattccgacaccacgcaattccccaccagatcattctatccaaggtcgacaagttcctcgttaaacaattgaagcagataaagaccggggtcacgcccgccaatatcgagcggctacagctcttgctccagggcatcaaacccattgtgcagccggacccgcgggcttcggaggggcctgggtctttgggtgagattttgacctgtagtgccgaagcacggattggtcctggccgggcgctggggatcgatgctgttcgttggtcgattttgtcggctgctggtattgatgggagcttgcagggtggccggcttgctgtgccgcctcctgcagagacgccggctatcttgtcgtgaagggcatgccttgttgtccgaattcaagtttaaatggagagaagtactccgtatgttgtaatatacatacaccccccaaacctactaaatgcttatctacaatatacacacagcactgttggctgacggtgtaaattattatgggccccttggtgacctccacgtgatctagttaccataaatcatcataactgatgcatacaaacattgttaatgaagctattcagagattaccttatcaattcgtctattaattccggatctgggtagtattggtaacaaggtaaactcataaaatgtttcgaaaccacgataaggtatacatttcgaatcaggttgaagcaacaatacaacaatccaataacgccaaatgacacgctaccgacagatcgactgtatacacagcggagtaagctgtaaatctatttcttgcgggttctgtgacggccgtcccatcaaagtctggaaatcaatttccagtgcatcaccagacaccactccattcctgagcctggccgactgagtacactccagggcgtgagtatgctggccactggtagtagccccaactcttcggttgacaactggggtccaaatctcgatatctgcatcgtgagacctaggattggcggagacaaggaccacaagctgggtttggtgatccgagttggagtaccaccagcgggcatccacctgtagccgagggacggactcggataggccgacctctagcacaagagagggccatggtataggtgccccggcggccggttccattccaggggaaaacgatgcgtctgcctccttactgcacatacgaccagctgatcgtccagcccctccaagccaaaaatcatggttgatgaagctcaaccccatattactaagagcatagttaatccaggtatcaaactgacggcttattttctcatggtagtggtacggtatgatcttatataagatcatatgctcgtggtagagaattgttgcgcgcaccccttttggaacgtcagggtgttcaataagcgccgaaaaaagatcgtccgggatccgttgtaccagaaggtattgcgagctaggagggtcctctgacacaagctttgttttgagtacgtcgagataatcccagagctcatcgagagaggagggtcggtcgaggatattggcggttagaagggttgtaggatcgaccccaaggtcaatactttcggcgttagaggatggaagagataaatcggcgttaccagaaggcatagcgagatgggaggtgggaggtgaagaattggatgggtaggaagtctgagaagtttgatgaacggagagaagagaccactgatcgaaatccttgagatggagatagcaagatatgtgcttggatacttgtagagcgtacggagtagttacgacccatgatgattgaacttacgtcacaataactcagcctcgaggtgtttatcctatggtccatgttggaaacatttgaatgcttcgctacgagaaccagcagccgtaagcagaacacatgtactatattacaatacaacctaaacaccaatccaactcatgacacaatttggaacagatcataggtaaccaatctattatgggcagtccgatacggacaaagcaagacgaaaaatatgtaaaagaatcaccgatctggcaggcaacagaatgggaagtcacataagcatcaggcaaagagaaaacgtatggatggcaggatgcatggggataggcaaatatttgggaatacagaatgatagaaacctccacataagagatgatgaaagatatgaaaaaaaaacgcctggtcccttatcgtaatgctgcagaaccaaagaatgccgaccgcgctatgcaaaggatatttttccgatggaagacgagagctgtaaggatgggtatcgtgaatgggggaatagagtgagaagagaagaaaagacagaggaaaggaagttagtataaggagaaaggttgtcggatgttgatattgatcgagggcagaaaatgcgtgctaagcatctcaatcagacaagtcgtcatcatcttcgatcccgccgaggacctcctgcccacgtcggttaacgacaatgcgttttgcaagcttgctttccgggactccatcccgtgcagcaccaaagtcgagaacctaggtggaaacaatattagcattaatcattggaatccctcattagagagaacttacttcgatataagtcaaactatcacgttgcaccgcggcaacacacctccggtcattgaacttgacttgccacacgccactaaggtctgtgaggaggtctcgaacacactcgccgtttcgcacatcccacatcttcagcgtccggtcagacccggagatgaccttctgtccatcgtgctggaagcaggtgatggcaccggtgtgtgcgctcagggtgttcttgcagtggccatgcacggagtcccagattcggagggtggaatcagcagcagcagagacaaggaaatcgtgctccaaagcgagcaggccaacgagagacgtatggccttcaagattatataggatggctccatcatctagtgaccaaactttaaccatgtggtccatggctccactaatgcaacgattgcgcttatggtcaagaaccacgctatacactttcatcgagtgaccctgcagagtatgtaaagtctgtccggtggaaaccttccagaccttcaccgtgcaatcgtaactaccactcacaagggtatcaccatgggctgcgattgcacgaactgagtgctgatggccggagagcacacgcaggaagtatggacagctagcgtcatccaccgtaggaccactctgatagtagactgggtcaccgggtttgggaagcttccacacccgaagatttgagtcacgagacccagtaatgatcaatggttctttgggcatcatctcaagctgaccatctgcattcctacctacctcggcaggcagaacgatttgcaagcatcggactgtggaagtgtggccgtggaagatctgagtacacctagcccgctcgatgtcccagactcgcactgaacgatcggtggagccggagactagcgtgttgccatgatattcaagagcccacactccaccttcgtggccctccagcgttgcctgcaacgcgcctgttttagtgtcgtacacgttgatgtttgtgtcatcgcttcccgtaagaaccttgtcggcgtcgaattgcaggcaagtaacaacatgacggtcatgagcacgaaaagcgatatgttgcggcttaacatccggctgcatccatcccttatggatggcaacatggcgacggtacagaactttgaagaggaacagcccacgaagagatggtagacccacttcggcatagggcaccgacccagctgcagcgctggcagcggcgtacggggcttctgacgcggcaatgtctctcctccagtctggatcggggagttctcctccactggatgagacctttcgcttggcaagcttccggcttgaagcacgtgtgtttgctttccgcttgccccgtcggctgattggcaaagaccctagagggcttctgctgctgggacccgccatcgaaggaacaggggacccttccatatccgccctggatggagtcaaaacgctgaggtcctcctcatggtcttcagggccgctggataactgccatccccatccctgtcttatagcccgttctagttctccatcagagagatgataaccatcttgctcgaggagattcctccagctcttttcatcggaattcgtaatgtgtctccacctcttagacacctgcgcagcacgacacatcgtctgtacgtcaaggtatttgacgatgttgagactaagctcaagcggcagaagagtcaggaagtcgcacttcaatgttggattaacgacatcggccacgaaatgaagagtaggtttagggcatctccgaagaaattgatacatgagatacgtcttgacctcatcaggcaccgaatcaaaaaactccaataccttgggcatatctaagagggagggaggggaccgtgagcttgcgagagaatggtcattcacccgagtctcatctgcatcttgaagccgcaagaccttagaaaaacgcgagacattatgatcgaggctggaatctgtatcaacgtcaagcccctctgattcgaaggaggattcgccatggagggcattcatagcagcaaccggtgagagacttgggctcgggaggcacatatcctgcgccatggcattgtctattgccgatagttgagacataagctcgggtctctcttgcattgcagattcctgtgttccatatgttgtatcatgaccaaatgaggctgattcatgtgcagttgaacaactctcatccgcttcagtagcctgagattcttggtttccggggtttgaacgaatcccagaaaatgcattctgcaagtaagaaccttgattggatgcctgtaagcccttagctccgatttcagatgagagaggtgaaggcaaaggaggttccctgcgcggaaacaccgagctgtggattcttggtcttgggggcacattttcgccaaatccgctcaggttgctttcggtgtctggggtggcaaggccggcggcaagatgagttgatccgacgccactttggcgagtgcggcgtgtgatgggctcagaaggagcccgtgttgggcgagttcgtgggagaaccgagggtcgagtatcgaaaagcgtgacgggggatacggcacgacggcgagtattgaaagggtggctagaaggttgactcgctattctcggaggggtcagccgccgagtggggttctcgccctcggcgatgaacgagttcacagagcgaatcgggccatttgaagattttaacgcctcgcttttctccttgtactatatattattatactgtaagcattggattcgactagaccaagagggtaggataaaatcgtacctcggcggcagcatttatagtatcctcgggctcgttaaagatgatggacttctcgccgatcttgaacttgaggttccttagagccgctggagttggagatgaggcgagagggtactgtcggacatccagatccttgacggctcgcggggggttgattgtcaacggcgggaaggaggtagtcgtggtggtggtggtcgtcaccaccgtagtccgggtagtcggggcgaaggagaactgtccgatggaggcatttgatggcccttggcccagctcctctctttcgtccatttcacgttttcgaggacgaatgaatcgagatccggggctgtgggtcgcgtgggaggtcgcagatacggatgcgttgtggtcagtcaaagccgagtcgacttctgatatttgaagggagctgggagcatttgaagtcattgtaaagcgagctcatgtgcaagaggacaaagaactgtgaatgtcccaaattaactttttttagcaaaacaccccctcagcacggtacaccagcaaaaccatcgatgcaaagggcattcagcacatagtgtcaagagccgaggataatcaagttgttaggggggggaaatagaacacaaataatggaagcaaggaagcaaagggaaggggagaaagaaacagtggcggctgagaaggagttggggcggagaacaacatttattccggttcccgtggacgatgtcatggcccaacgtgcaacatttggattctttctgattctttgctatttagctgttgatttttcatatattagacctgttaccttgactactgtctacggatgtgaaatgccaaatgatccgagtgtgaaacctggagaaagggcccctggttctgctctagaccggcagaactgattaccagatagaggtgggaccgaggagacactcagataagccggttgacttcctcttgcccagcgcctttataacgtaataaccaggattctattagctattcgcccctaaatcataacgtaatcggtaagcgagtggccactgtaagcgagtggccaccccaccccannnnnnnnnnnnnnnnnnnnnnnnnnnnnnnnnnnnnnnnnnnnnnnnnnnnnnnnnnnnnnnnnnnnnnnnnnnnnnnnnnnnnnnnnnnnnnnnnnnnnnncgtaatcggtaagggagtggccactgtaagcgagtggccaccctacccaagagtatagttttctaaggtaaatatttcaaccagaacgccattaaattaattaaactaaaaaagatcatttatctggacacctattgatcttatgccctgtctttccacacccactacaccttggtgcagcccgtggtcgtggttctaaccctgattgagtgcttccgcccggggggtgtaggggtatttctaatgcttccaccagcctagcaatgatttcagaagcttcttgaactgagaggccttcttcggcgggtatctgccgtctagatcgggcccgcttttgcttcttattctcattttcatcccgtaaatccttgttttctttcgctagtaaaatagcgctatgcattgcaagctcgcagcctttgataagttggtttaatgcacgtttagaagggcttattaggcttcgagattgggttcgaagtaaagctttaatagacaaagcctgtcgacgtagatctttgctattaaaaggggtttttggggtgaaattccggcttgaatcgctaccccggcttagggggggggttggcgttcgaagataaatattaagttttaaaagtacccgattaggtaaaaaaggtattaaaccagctgctaagaagctatttttaattgtctccaatttaaaagcttcaatttatacggaggggtatacttcgaggaatttaagtttattaatatagttaatcctagtccgcatttttatcttaaccaaccggccatataaccgttttaccaccgtaaaacaaccgatattaagaggttataaaagataagaggaatacagtagtatataaattagtataatatcgttttccttataaatttaatcgaattgaggggttaaatggcttctatagctatcgagtactaaaagtcgataccttcctactatatataataaagttgatagtataaagagtttctaaagctagcgaagtccaatttcatctgatatctatctatttagactaactttaaagtgctagttactaggaaggccttcgaaccataatttaaggaagaccttacctttaaaaataatatatagagggaggacctatcctaccgcgtttatacatttaattgcagttacctactcgcgatttctaggttgtaaaagtaatctccaactgtagtatttacttcttattataacctttgccgttatagttaatcctattataaatccagtctcatcgaagttataaatatcatctaggttaatcccaaattaaataatagttttttaaataagattaaactattctccaatgatttttaggtctttacacttcgcgcgcttataattataacatcttaagaaccgagaggaaagaagagggcgttgttttatgaaattgtaaacctatttttcgctaaccaaaatgactagggtagttccgcgctttttaagaagaagattcgccatttcttataccatagagggccggggagctgatccacgagaatccatagagagaatccatttttgaagagattcctcttcaattgtagtcaatttagtcgagttggcgcgagaagtcgcgcggcattgtattccatcgaggcggcgccgaagggttgaacgcgggacgttaaaggtacgggcggcaatagaaatattggtaaattcttgtttcttaaaagcctggatagctagtaagatcctaccctcctgctctattgaatctttagaggattgagagcgaattggtggcatggtgggtggttgaactaagtaagtgctaattcatggacgcgtttttgggtagggtggccacccgcttaccgtggccactcgctttccgannnnnnnnnnnnnnnnnnnnnnnnnnnnnnnnnnnnnnnnnnnnnnnnnnnnnnnnnnnnnnnnnnnnnnnnnnnnnnnnnnnnnnnnnnnnnnnnnnnnnnnnnnnnnnnnnnnnnnnnnnnnnnnnnnnnnnnnnnnnnnnnnnnnnnnnnnnnnnnnnnnnnnnnnnnnnnnnnnnnnnnnnnnnnnnnnnnnnnnnnnnnnnnnnnnnnnnnnnnnnnnnnnnnnnnnnnnnnnnnnnnnnnnnnnnnnnnnnnnnnnnnnnnnnnnnnnnnnnnnnnnnnnnnnnnnnnnnnnnnnnnnnnnnnnnnnnnnnnnnnnnnnnnnnnnnnnnnnnnnnnnnnnnnnnnnnnnnnnnnnnnnnnnnnnnnnnnnnnnnnnnnnnnnnnnnnnnnnnnnnnnnnnnnnnnnnnnnnnnnnnnnnnnnnnnnnnnnnnnnnnnnnnnnnnnnnnnnnnnnnnnnnnnnnnnnnnnnnnnnnnnnnnnnnnnnnnnnnnnnnnnnnnnnnnnnnntatcctcttgggtggggtggccactcgcttacagtggccactcgcttaccgattacgttacatatcatggtcattcatccaagttctatcaagtttctgatttgccatcgccatgcatcacgtgaagtgggggcgtgcctcgggtggcttcttggcacggggcgtatctcattgttatgaagaaatcatttcccagggggctcattgggcagacataggggtacagaataatcatcgtgcagtccattgtcccttactactgacttactctatgcatgtcatatactctccaggtgcaatacccaccggctgatatctgcaataacaatgtctcgcccctccccacatcgatttagggtttggttgcttttacgtactacacctctccagccctacctctaatgatatccttggatatattcgcagcgttacacttgatttgacagatgacatatctagaggaatatatctggacttgggtcaatgaatcatctggtcccttgtttgctggaaatccgatacgagacaggattatgatatatattccagggcaaagtgacgttatagatgctgacgtagaatgaaaaaccaaatggtgaagacaaacatgaaagatgactagggccctaatacaatgggatctgagctgtgtctatgaatagactcgctagttccaaactttgttaatatctaagaatgaaatatgtttcactcgctagagcttgccgtttcctgatgctaagactccgagctaagcaagacacatcttctacaaaaatgtccagatcctatgatgtttccgagtttgctgaatccttagacgacccatcgataatttgcggactttgtaccgggagaggacgacagcggcttccacatctatgtttccttattgtgtttctttgcctaacatttgtttctcttcgattgatgttcatgcctaacatatagaagagtcggacctagagtgaattcttctttctgcctcatccggtggcgaggctcactttccttcggtggaggaagctaacgacgctgcagtgctcccttctgacgaacttggattcccattcacatcgaatatcttgatgaagcactcattcgacccgggcgcacagacaagaaagtgcattttaagctcgcagatagggaaatctcggctcaaatttttaacagagtcttcaagtagacacccgaccacaatcactctaagaagcaaatgggcgacgagacgattgcgaggcttgctaatattttgcttccaacgtgccagatcagggtttcagataagatatacgttagaaacgagccgagggtaagtacaacggagagacaaacgtgcattctcccaagtagaactttccgacgacatttgaaagtacctagttgaagcaccttcccctctcggcgtagaaggccttctccatatttacaaccacgaacgaggggattgccaatgtgagatttatgtataaatcaggaccgtacaagaaatgcatgtccaaacagactcaaaggagttttggctgagatatgcatatgttgtatgaaattagtatgtaggttgggttgggtggaccactggcttacacgtgtcacgtggatctaaccctatttgtggcagatctgcctggaggcttatgtctaggcccctctcaaccccgcccttgacctgcactctatggcatctatattatcccccgactgaacgggcgctacaattggcactcttggcgacctgagaaccggggaatcgcgggattaaactgcgaggctgcagcgagtttcagtctctggctcagcagggcaaaatctctccgggcaaaattccatcggatggatggtgtcggtccgacccgccttatcttatgcacgttcatgtccaacgactgtttggaaatgtggtgtctagactcgtacggcagaaattgaaagactgaaggaaagatggaaatgtgcaccgaggatgacatgagtagcagggattggctactgcaaccatcatcgaagcgtaacgcaggtctgcagtggatgtgtacgaatcaactgccgtctttaaaggagtggagcggaatgaccccaagggatgtgatgtgtctgaggtgaggtgcgttggtcatagccatcagcccaataccctttcgctgaactgcccatccccaggctagcggactgatgaccatttctctttatgctttgcccttatgctttgcccttatgcttataactcattcctgcaagcaatattaccggactgaagagaggtttcgcagcaagcagcagcaactgttcacggcggggagcggaacccgctggacagcaccgggctctgcctactgtccctcgatggcggcggcgtgcccggacgctcgaccctgtacatcctgaagggttgatggattgactgaaccagacacgccccgagggtgcacccgcaaagaaaccctgcaaggtgtttgaccttctaggcggcactagtacaggcgggtgggttgattcagtccatggtataatatcggatggcttacagatgtagattgattgcaattatattaggtcgattggggatggatgtcgatgagtgtattatggcgtacatcaagtttacgaaaattatttttgacaaaccctcaaaacggggcgtatccagcctttttggtaagattaagccccaattcgataccgacaagctcgagggtgcaaccaaagaagtcatcaatagctatagagctaagccgaccgatttattcaatcatcaagctgacccaggttgtcgggtgtaagtgtatatgagctaatggtcccgtatcctgctaacggctccaggttcgtctgcagcataacgtaggagaccagggagatcgtgcaccttcgcagctattccatacgcaacaagcctggaattccggccaccatcagccaggccgcctgcgcaacctccgccgccacaaccttcttcaagccggtgtctattggggcacgcaaattcgtggatggtacgctcggggcaaaaaccccgtggatgaagtggaagacgaaacgtctgacatctggtatgaagaaacaggcgacctgaagccgctggtggagtgctttatcttgatcggcaccggcaaccccgggaagaaggcgatggaggacaacctactcaagtttgtttctaaaaccctgccaagtctcgtcacctaaactgagtatacggagaagcgattcatcgctaaatggcgacagcattatgatagcaagcgatatttccgaatcaatgtagatcaggggttataggacattgggctggcagaatatcaggagcaaggcttgattgaagcagcaacagagggatatctcgaccaccaggcagtggcattccgagtgcgggattgtgttgagaatctgagatcaaagtagagtgtgtatttagaagattttacatagtcctggtattcttcggctaacggatacgagacgtgattgatagggagggtcgatgctggtatggatgtacaggcaatttgtgcattttatgcactttatgcactttttgaactcttgcgccaaaatgatgtcaagtctcacgatttggaaagtgggatgtgaaatgtggaggatttccctgatttccatgattttcgttccatgatctgcaccgaagacaatagatcgacaatagaggcgtatccgaaaccctgggacgagactaggctattggagtcgactattggcgaccatcaggggttaaccgcatgaccatccgacttagccgcctaccaaaccactagctgttccggttgactgcgcttggggtgaatgtggcgctcggagtattttcttttcttttgtctttgtgtgtctgacgagtattcgaaggatgtgttgttgttctacatatcggagtcggagcggcagaccgaaacccgctaattacgtatacggaggttgatcggcgttcgtccaatcgatctcggagatctcgatctgagtgaaattgcgccccggagtgtcatcgctgcttgttccgcctcgtgggtcaaagacgcggcacatgggctgattcaatacaaagtttgtctatagtgtttgtgcctcctatttttgagaaattgcgctcgcatgtttgacaccgagtcttacaatataggtaaggtccctataaaagcgccctcgcgatcttggtgacacccgtgaattgtcaaaccgtgttaaactgtcagtcgcaaacgatcagattcatgtctcagtatcttcccgagtatgtagcacatgcgaaaggtggagtccgaaaggagcccgcatgcaagtcgatcattgccagttcctgggcctttggacgtgtatccatggaacagagagtattcttagtcgaaacatcactgcccagggttcgagggggcgattacggagtttatcctccggacacgggctggtatttgtcatggagcacatcgagtgggggcctctatcgtattagagcggttctgaataacaagatctcagaatacttcgctccggcgcattgataaacgatcgatttgtcgatctgctctcagacgcgaccgcaagttccagctatggacttggtgtcgctcaaatatggatactccatagttcgtggctctagacttgactagactccacattctggcgatagctccgtgctgtgtgtgttttaggaaaaagcatccatgtgagtggataggacaagcggattggtacctgaattagtggagcagacggagttataattccaattagcgacggcaaggacgtgagcagacctcgtgggaggcgtcgatagcgcaaactcacggacaatgccacgttcttgatgtgggcgttgactattttttttaggttgcagataccgcagtaaggggtaaatgttaagattcgaagtagtatatgtacggagtatactaaggaataatagtgttatgcaaatgcatgttatatagcatgatatgtaggttagagcatacataacccctatcacaaccttggatatcacatcctacacgaagccctaaaacttcgtatccatatactccgtacttccagtatttctaatattatatgtcgatcaactctcgagagaccgtgctccactcgaaattaaatttggaataaatgaaacgctgcttttcagcctatgaggattctttaagacatcggtggagtctcccccctttaagcgcgtgaacaggaaatctttcaaactcatttgcctgttctgtactacactcgacgctttcgtacaaaaaacatccgaatcccaactgatcacgcattttggatcttttatttttaccaaatctatacatcccttccccagtcccgagtcaatccttaaacagcaaacgtttctttctatttctgggtacgttgcggttcagcccaatttcccctaaattgcagactaagtaactaatttagtggagtagattcaaccgaagcgagatacttgaaccaggaacccccccgcttacacaatttgcgcattcagtccaaccattcgcatcatacgattcatgcgcaattgaactgcgctctgtctctcccaccatgggacaccgagaactcacaccggtccatgtgccacttcgaacgtcgagtcgcaaaccggcacaacacgaaccaatgaacacccaggaacagacccgagtcgaccgacgaacctcgaaggcccaaagatttttcggaaccgatatatcacttcccacggaacatggcgggtggcaggagcctccaaatgtacaacgaccgagctttgcgaagccgaataatgctcctagacaaggcaccggtctggttccgtttccgcgttcttcagagaataccttgattcccgatcagaaccttcgcgtacgggcttcatcgcctctgctaggccaggacttccgatcccaggaggccgcgccgccgcttcccaagtcttcgaaaaaggttcaccattccggttcctcgtccacccttttctcctatttcagctcgaaagaatcggccaaatcggccaaatcgcctaaatcgcctaaatcacccaagaaccgtggactccagccgagagtacggcacgaactctccagtgagccccaagtgacatacacgaagcctcaagaatcaccgaaagaatccaagcggaagatgcgtccttcaaaaattgatctttccgtcttgttcccgaagccgcggaatccccaaccccaaacacttctgtccccccaccggatggtcaactcgccctcccctgtctcttcaatggacccggatatttcttcaaacaagattgaaaggatgaccggcggcatgagcaactccaccacgaggagatacgacgcacctccccctcgatcttcaatcaccaagaatgacctacccaaaaatggtcttgatcacttcgatttgccctcgattgcagagagcaaaagtaacgagtggttggagcaaccgcttgagcggacagtaggaacgagtgagattgatatagccctggatagatatgaggggcaacgatcactcttgagtcgctcgagcacgtatactaccagtcaagagcaattacggccagaacagcaacgcccccaggaacctcgcaagagctcaagacgtcctcacagctcctctcgacctaatgagacgtacttgagtcctccctcatgtccagacacaaaccgtggtcgcgtcgcgagtacctcccaggagtcgtggaagactaatgagtcaaaatcaaagagcgagaagagctcgttgaccaagaagggcagcaaaagtactttgaagaacaaagatctgcgaaacaccagtatgctttgcctttcctcttcttcagaggacgaggatgaggaccgaactccaaccaccgacaagcgctatacaaacaagtctagaagagacagtgtggctacttacgacgaatatgagccccagctctacacggcttctactgcccacgcgaccactgccacggcggcgaaacgctttgaccggagactctcgactagcacgcgtggctcccgccaaaccgaaaagagcctgccagtgctcgaagctcgcccacgaaaggcttctcaatcctcgaatggcaagtcttctcagaaatctggacgaaccacgcaaacccgccgttcgagcgaagttcccgctatcccagatgacattctggcgcaattcccacagcagcctctacgtacccccgcagagttgaaagagttgaaccggagaagtcgtgtgatcgccgtgacccgccaagagcaggatctcctcgaggcgatgcgtattcgaaagggcaaggtcacacccagtttgttgaatgcgcacggagcggatagaagatcgctagcctctggcccatcgcgcgattctttctgcggatccgacacctcattcttgcgtctcagccatgtattcccgccattcgatgcaccgtcagaaaagggtgctacccaatacaaagatggaacgccatcccaaagctcgggctcggatagtgaatggaaaccccgcactgcagtttcctcctctagtctcagtgtggattattccgaaagcctgccatctccttccaccagcggtgcttcgccgctgacccccactttgccaattcatcgtttctcgccgcttccctcttccaagcccccaagagggcccccaccggccatcccccaagagcagaagcagcacacccgccgtcgcaccgatagtagcgaggctatcctgctggatagtggtggtgagtcaaaacgcaacaccggccttcctctctggtctttcgactttgattggaaccaggaaagtgccaatctccctcctgtgcactgatcgcttggcccttgataccagacactctcattccatcccttgcatttcctatttcacccttctatctctctctattcctacttgaaatgaccttttacggtcttgcctgcatttccttgacttgcagcacttcgctccaagcttctctttacccaaccacatagacctcttattcctttcctacgtgacccttttgcttatgtcttctcactatttattcttttctttttggattagcgttcactcgcgggcttctgcacctgctatcatgttttacttggatggttttcgtgcctttctcacgatctcatcatttccggctcacgatcataatcattaatatccccaatgatcatcaatttatcaactgaactcatgcaattttcttgcccgattcttcacataattcctgccgcgctctagcttagcctgagtcgggtatcgcggtgtatagcggccatttgggactttgggctttcagttttcgccgctcatatatctctcttctagaatttcaaatactagggtacttggaatgttatatcaacctcctaatgggatcaccgtgtttgttgtaagtttctcatttatatagaagcaagatagttggccgcttatacaagctctttacttggcgagctaggatttgaagaatctgaacatcttgtcttgttcaatgtctttgtagatccctataaatgcccatgataaccaatcttggatatgaaatagacaatatcgacgaatgacgacatgcgaggagaataacaatggctgtgaataatgtctggctagctcgacgtcatcaacaactctcccaaaatccagtactccacacagaacattctaaatgtgatatgagatacccacaaaaggtacacagccggaattgtacacatcacttacctcacgcgacaacttccaaggtcgaacccttggtgagcagtgatccactccttgaccgccgaccttttcgtctataaccccggattattgcttgagcactctatcatcttcctctcctttcttttctaagctcttttccaagttcttcggaaccctcattcatacagtggagtcagccgacgcccattctctccttcgcctcccagccactcgcgtcgcctccgatcgccctcgggaaaccctatccggacctaaaagggaagatctccagaccagcccacccctggttcgcgagttgggatttgcagtttgctctacggaggacatcatcatacacacttttcctgtcgctgcctcaactgagcccatttaccacattcacggattggggaacatactgcgtgccccttttgcggaaacgttagccgctgtttatagggaacacgtacttcgttatgggagatcgcgctcaacgtcagcctactgggctgcgagctgcggccaatgttgcgccatggattctggtatgagcttgttggggaatacagcttttgcgatcttgggcactgttcgctgacttcgttcccttccagttgactgcggagtccactgcatttgtgctggtaagtcatcctgcgcgtgtagattcttgtgacaggaagatgagaaggctaattgtatttttacactatagctagctcactattctcgagtcatgccacccgccggtggtaaacgctacctgacctctacagcagtcttcctagtcgaagtggtcaagctggccatctccctcacaatggcactctacgacgtctccaaaaccgcaccaccctcaatgcccgccacctccctcttcttctccctcacaagcgccgtgttctcgggtgacagctggaaactcgctatccctgccgggctcgacgtcttgtccaactccctgctgtacattgcgctctcgaacctacgagctgcatcgttccaggttacattccagctgaagtttcttaccactgcggtctttggcctgatgctcctgagacggagcatccctccccgcaagtggggcctgcttttgcttctcattgtgggcgtggcgttggtgcagatccccgatgctagcccagagcaaatgttgcaggatgatcatactagccattatttccctcgatccctggaggaatggaaagctgtcaagcaaggtgctggttctggcagcagtttgcaaaagcggtctgcaacatacgagggcattgaggaggacatcctgacggctgacccacacttgaaccccacaattggtctccttgcgaccattggagcgtctttggcttctgggcttgcggggatttatttcgagaaagtcctaaaggacagctcgaaccatatatcgttgtgggtccgcaatgtgcaattagccgtctactccgtcttcccggctctcttcattgggattgtcttccgggatggcgaaaagatcgccgaagatggtttcttccagggctacaattgggcggtgtggtctaccatcatcctccaggccttgggtggtatcgtttctgcattctacgtcagccacgcgcagaaggatgcaaggagtttcgccacaactgccaacataattttgagcattgtgggaagcatctggctatttgaatttgaggtcaatgcaagcgtaagttccttgcctctcaaacacttctcttctgtttcagatgcgccctcgacatgaattatgaacaaaactgactgggacattatagttcctcctgggctcggctgcagtcctggtagcaacccactactatgggaaccccaccttcagccctgtgatgggtgccttgcgtccgcctccaatccgcatcgacgcctacgaaaaggaccccgcaggtgacgagggctcccccgtggtgccttccaatgacttctctatcaaacttccaacctcacctttcctctctgacggcatgtcgtcctcccgtcccacctcaccagcaccaggccataccagagtaagctccagccggaatgcaagcgcgaattatttcgatgagaaatgattactgtaactcgctatgcatattgctattggcccacctgacgagatgctctttacgggaaatgatattggatacttgatagatgcgggtggaagtgcggtgttcaagaaagccgcctgtcgcaagcccatttactatgcttggtgccgctcccaatttggagcgtagctactcttcgctgccaaattttgccctcttactgtcaagatgtttgccggttttggctcatgtatgcatatatacgaagcaatgaaagactttgatataccccacgatacttgaaaattgctattcttactgatttgagaagaaactgctgcagcatatgcatatgttacaaaggcatgggttcgcccacgtgctgtcacgttatcgggatgatggaccttggaaccaaggcactttcaaaattcatcaccacaaccccatattcaatcccaatcatcgagaacgcatctcaagatgcggagaaataatcagacatcgaatttcaaaccctttcaattgccttcccagaggcgcacaaatgcctcctccccgtccaagaatagtagtataaccaggatcatcaacgagaaactcatccaaggctcccagaagccacaatacagcagcccatctccccgaaagccctccagtggcctgggatcatcagctcatgatgacgacccccaattggatgcttttggtgagtctgccggcttatcatcatggcgggtgctgattgaatccagacctagaactactagcctcagaggatatagagaatcaggattcgggatttggagtttctcaatctacaccgcttcaagcatctcgccatcctgatctacagacatcccatgtctctcgtttctttcagcgtgagttgcttgtatacccgtgctagtgttcctgtcttgttgattcggaattaacaagtaatagcaagctcgagtaccgtttcttctcgctggaatgggcccggttcatcggacactgttttagggcctccctcgagcccgttggcttcgttccaccagaagaagaatgggatacggatgggacagcgcagccttgagacgaatcgtggcccataccgcaatgagactagtcaatcctcaccccagaaaccgatcgcccaggcgggctcagaggctttgactggaaacagacaacgtcaaagcctattcagcaatatcccatcctctgtgcgggggatcgtactcgtatcagtgaatgacctaccggagaactaccgctcgatgttccccttcccacttttcaatgccattcaatccaaatccttccattccgtctacaacagcaatgacaacatcgtcctatccgccccaaccggcagcggcaagacagtggtgatggaattggccatctgcagactcctgaacaccctcaaagacgaacgcttcaaagtagtctaccaagcacctaccaagtccctttgcaacgagcgctttcgagactggcactccaagttctccagcttgaacctcaagtgcgcagaactgaccggagacacggaccacatgcagctgcgcaacgtccagagtagccagattatcatcacgacccccgagaaatgggatagcatgactaggaaatggaaagatcatatgaagttgatgcagctcgtgaagctctttctcattgacgaggtacatattctgaaggagacgcgcggagctacgctcgaggctgtggtttcccggatgaagaatattggatcgaatgtgcggtttgtggctttgagtgcgactgttcctaactccgaggatattgctacctggcttgggaaggatgcgacaaaccagcatgttcctgcccaccgggagcatttcggtgaagagtttcgtcccgtcattttgaagaaggttgtctatggatatgcgtctaactcgaatgactttgcatttgataaagtctgcggttcgaagtatgtgaccttttttgttctgcctttttcctttgaattactcgttggcatactgattggagcttgaaaaggttacccgaagtgatcggaatgcattcatgccagaagcccattctgatattctgttgcacacggaactcagcgcttgcgacggcgaaagaattggctcgccttcacacattgacgaatccacctgccaggctttggaaggaacccaagaagcgcctcgaggctcataatgaggatctcaagagtatggttcagagacttactctaaagaaacacagctaattcgagatagcaacactcgctgctggtgtagcattccatcacgctggtttgggccccgctgatcgccacactgtcgagacaggctttagagacgggcatatcaacgtcatatgctgcacgtctacacttgcagttggaattaacctgccttgccacctcgtcataatcaaaaacactgtctgttggcaagatggaggctgcaaggagtattcggatctggagatgatgcagatgctgggccgcgcgggccgacctcaattcgacgatagtgcaacagcggccatcctcaccaggaaggaacgtgtaagtcactatgagaaactggttcaggggtctgagagtctggagagctgcttgcatttgaatttgattgatcatctcaacgctgagattggcttggggaatatctcggacgtcgaatcggctgtcaaatggctcgctgggacattcttgtttgttaggcttcgtcgaaatccgacgcactacaagctcaaagaaggtgcaaaccaggaagacgaggatgagttgcttcgccagatctgtgagaaggatatcgatcttcttcggaaatgcggtctgattgaagctgagagccttcgatcgacccagtttggcgacgctatggctcggtactatatccagttcgagactatgaaagttctactgtcgctgaggccacaagcgaccttgtccgagactgtgagcctattctttccgcgctgttgaaatgaagtatcttgactgacattagtccagctcaccgtgattgcacaaggcgaagaattccgcgagatccgcctcaaagccggcgagaaaccactctaccgagagatcaaccgtgatcctggcattcgcttccccatcaaagtcgacctagccctcccggcccacaaagtctcactactcattcaatctgagctaggggcaattgagtatcccgataacgagcaattacagaaacacaaattcaccttccagcaagacaaaagtctagtgttcgcgcatgtcaaccgactaatccgttgtctgatcgactgtcaaatcgcccgcggcgactcaatcgcaacccgcaatgccctggaactcgctcggagcttcggagcgaaggtctgggaccactcgcccctacaaatgaaacagatcgagcaagtgggtgttgttacagtccggaagttggctgctgctgggattaccagtatcgaaggtctggattgtgcggagcctcatcagattgagatggttcttagcaagaacccgccgttcggatcgaagttgctctcgagattgaaggagtttccgaaactgagggtttctgtgaagatgcttggaaaggtttgcaacttaatatggcgacaaatgtcattttgctaacctgggatataggaagtgaaatttaaatgtgtcaatgtccgattcaaggttgaagtcgcgttcatgaacgacaaggttccgacgttctttcaacgtcgtccggtttacgtgtgttgcatgatagagaggtctgatggccacataatcgatttcagacgcacaaggtaagatattcatccagttatctcgttataggcaaacgctgatattcttccagtgcgaataagctccaggaaaaactggaaattgaatttaccgctgacttgacgagtccggagcatgtcattatctgcgatgttatgtgtgatgagatcggtaagacctttgaacatgaacaaaaactattcgtgctgacaattatccagcggggacgtggagacaagctgagcttgaacctaacctgccatctcacatttttgctgctatacgggataagaatgccaaggcccaaattactgaaacctcgtgtcatctcaaggggaatttgaatcctaaagacgcagagaaaccaaagaccaacacgactcgtccccacggacgagatataaccagtgtcaagacaaagtcgcggtgggatgtggacgattttgatggcgatgacctccagctcgatgatttcctcgttgtggatgaacgccgtggcaaagctaaggaatctacaaagccacatcctgaacagtttgatgatatagattggttctcaatggattcaaccccaccgagcacagctaagagaataccgaaggtctcaaatccccgagaagaagactgggcggttgatatggacgagccagaggctgagtacgagccagtcagacttgcgaatggcaaatgggcttgcaaccacaaatgcaaagacaaaacaaggtttgagaatctttactttctttattgtcaagctaataacttcagctgcaaacatttctgttgccgcgagggtctggaaaagcccccgaaacccccgaaggtaccgaagcgggccgtccccgtggccccaaaagaagctggtctcaatcaaatgactatctctgcaagtatcacaaaggcaaccccaaccagtaactcgatttcgagaaacaaagtggccaaacaacgcgtcacggggtttaagaatgacgaccgtgtttcaaagcctaagaaaatgccgatgtcgcaggctgcaaagaagaatccaagtcgagagaagtctgtcctttcggagagggacaagaatccttcatataagagggattgggaaatgagtccaatgaatctcctctcgagtgactatggtgacgataacttcgacgatttaccgtctccatcacgacttctcgtaaatagcggaccagggcttagaacatcagtttctccggtggtgaatggccaggcaaagaaaaacatcacagatgttgcaatcattgaaacgaagcatatagacctcgagcctttgctctacgcttcacggtccgccgtcccgcaaaaagaccaaaccaagccatcaacccccaaacaacacgagataatcgagattctagacgacacacctccagactcaacaaaattgccaatgacgacaaaaaagaaggagtcttctgtcaagctgaacacgcttccactttcaacaaaagcagaccaagcccccgatctaaaacggaaggcgagtcaagtcgaagctcgaacagaagaccacaaaaaacgagtgaagcaaagtcccttcgtttcggctttgcagttccacacttcaaactacctgaacgatatacaaccactgaaccccgagcatcctgcgtctcctgtttctcctgtctctcctgtttctcccggtgctgctgtttctcctatgatcggcggtgggatagatttgactgcatcatttgacgacggaacagatctgcttgacgagttcaaggatattatcaaatttatctaaatgattgggaaatgctggccaagtggcggaactttttgttttccccttacgcatctctaggatttattttgcgtgctggtatgtatggtgctgggttactgaactggtgcaagttgcggctttacttttatatacactactgtgctatgctacattgacatttataattctcggcatgaaattatcctgagagaatttcgttgcattgatattctctaattttttgcaccctgaaggacggtgtagagctgtgattatagcataccaaccacaataaattaaagtttaattatctctttctgcacacatttcttgaatagtaagtacagtagttatcgtaaaaagtgtagtgtcgatctagacatccgtaacataacagcatatacatatcctagtagacattaacagtccggttgccaatatagagacgaccgggatttagggcattgtttcgcccatggtaagactgtgaatggacggaccaaagctcgcaatacatgggacttcaaactgtcccttcgttcttggcattatgaacttcgggtttgtcctcggggtagtccgtgtctgtccaggtctcccagaaacaggcacccttcttgagcgaagtgatagtctcccaaattagagtaaacacaaacaaggccatgatgattgacaacacgtcagttgcattcaggtggtcagccaggggcaaaaggatcgtgatgataccgactgcagggcgcatgatgagtcggaaaggctaggacaaacattagtgactggcgtggtgggatgcaagtaatagacggagggggcgttgacttaccttgtccaagatcaaagtccccgattcatcattggacttgtgcagcagagcaaacacgtacaaaaagatcatgcctgcacccagaccgccacaaaggagccagcgctgtggagcttcgaactctttctcggcaactgactgtgccgcaacatgtccgccagctagcagactggcaataagtggtagatgaatcagggcccaggaaaaagctgtataaaccgagtgccgcaggggtgagtggtatttaatgagccatcggcgtgggcatacagccaattcaaacagaacgcaataaccaatgtccaaacagctcgcagaaggcgtttattgagtccaactgcagcataggagccaacaataatcaaatagagaaactcgcccagcgcaatgatgtagaatgcagagaaccgatcaatttcgtgagcgatatccactgccgtcgaccacctgacgcgaaggagtttcttaccagccggcgagtagcacagaatccaaaccatggtctcaaccgagatagcgacagcagcagccgcgatcttgccgcggatcgagactgactcgaagtatagtgggatgtaaatgcatagtgacagactggaaaggacaacccagaggcgctgctgcggacggtggtggtagctggcgaaggagtagaatacgtgggcgaggttgcatgagattcgcgcgaccatgtaggatcccacggtggagcgcatggcaccgatctcctcgtcgacgagtggggcgttgttgccgtatacgaccagtacggccatgacccacagaatcaggatgcgctgtaggagatcgtcggtgtagaaggcgttcatcaactcgcgcagatcgctccaaacgttccatgatggcgccaggatcagctgtgagcgtgttagcttatctatcgcgtctgaaagtggatgggatagtggaggcgatggtggacccgatagtagaagggcggccaactcacaatatatttgaccagtttggcacctgagatgtcttcagcgagggtatcggcgaagttcgacaggatcgcgacatagagcagatcgaggaatagctcgaatcgcccggcttgtcgctcaccatcctgacggcgcatcaacttcccatcctcgaaccattgtagggcgcgtggttggtggaataagaaacgaggatttgactggggctcctcaggcgttgaggccgacatgactgtgcgatgtaaaagagatcgagcctagcaaggggattgaaaagcttaaaacgggccaatctcttggccccacagttcgtccccgcaaatcagattgcacaatttcggatatattatgtcatcaattttatacccagatcacatgaccggggaaaccatattatcatttgtcagcatatgttcggcgaacctgcttttccaaggctgttctattgttaccccgttagtttctagtaaattgcacatacttggacaattaacatcctctcaagagcttgtgctctctgtgcaaaatccgaatcatgaattcggcgaaagtttagcgaagtcgagcaatgcgaaccggcaatttgcaattccgtatctgagtactagtttgatctccttctagaacatgtggggctcggcggtatagagcattaacacccagccttttcataccattcaggcgggtaatctggcataggatgagcgggtatggggagaaaatccgtcgaatgtctcgataatctttggggtgattttgacgttttgtttcggctgaaagcaggtgagcattaaccgaggaatacctggagctccctgagacttacaagggatacttttggatgttcctccacgcacacagaatagcctctttctgcgccatttcatgatctgataaaggatccacagactccaagagaagggaattgaagcttccatcttttccatcaaatatccactgcatgcagaactcaaacaatcttgggtagaagcccgcagatgcccaatcaataaggcacaaggagccatcttcctgccatatgatgtttcgaggtacaatatccagatgacagagcacgagatcacagccctgtaaatctaagttcgggttatgcgcaaaaagccggctattgaaccactcctctatccggctaagactgtcgaaaaccaggtcttctgtttgagggaatagaaggccacgacaagcgcctctataaagtgatccagggatattatacctcaatgttgcgaaatgccccagcatgctggcaaccctctgtatagcgctaacgtcctctaaaggatcgatgacctttccttctataaattccatcacaatataaccccagtcttgctcgtcagcaaaaaaaatcataaacacgtgggatacgagctatgcggctgtccacaagctcataagctatcctttgattttcaaattcttctcttatcacatctgggccgcatttaacgacttgatgatcagagattctgataattcgtttgctgtattggctaacaacgttgccaggcaacgggtttgcgcaagaagcgatcactgaggctcgttgcgagtcttcgggacgcgacattcttttagaatggaagactaattgggagtaaaatatcataggacaacccaggtctggggattcaaattagttataaagatgataagagaatgtcttgtcttgttggaaataagaaatataacttggcgcggagcggggtaaaaaggggccgaagaatgttatggtagcccccgtttgtgaaaatctggaaagcgcgagtaaggagcggtgtaaagtagagatgcaactcgccgctaagtttgcttgttaatatggcgcctgggagcattgctaaaactatcattaggtacacagctaagagttcagggtccgtcaacggtagtgagaatgtgaggacagtcgttcagaaaatttcctagaggaccaattaacggctttcgcctatcaaatggaattttcgttcttaaaggattctttttgtttcattgcggtagtgaaatgtatgcctaggtgtatatacgtacatgcatgaatctcctactgtggcacgtgctacaccacgtgcagtacccggtattcggcccgccccggagagccgcaccgccttgcgggtactgcctctaggtacccaccgccctcaggggggtataagaaggtggccctgcccccggaacttccttttcttttctttcttcttcagctctctttgcctctggcttagatcaagtgtagtatctgttctattcagtttaatcgctgaatgttctgcattgcagaacgtcatgattatactaatttttggacctcgcgacttggcctctgtgcttgcatacgcctcgttgcactgtgtcactgggcttacactaccctcggtcgatgcgaaccctcttttttttcattaatcattcggcttgtccgggtgtttgaagaagaaagctgtagaagttccatcatgaaaccccgtatgcctctcgtatcaacgcgcccatcatcgactaacagatgcctttctctcacaatatgccagctagctgtgtcatatacctgtgcaagtccttacttgcaaacgaaccgtttcccattctctcctttgacgcactccataccgtgagcaacccgcttctcgacacggtcggcctctccatcgacgaattccacaccatcattaatttaatctcgacacagtcggtaccctccttcaacacatatcccactacacttccctgaactatcacccccacaatctgctactcgcgcagtcaactcccttcatacatcgcacaatgtcttcttcttctagcagctttgccaaactaaagctcctagaaatcattcgtcttagcccctactagcgaaaacaccttctctttgtggtcggccacatactcgtgtacactttcaacactcgtgaccctcaccctttcgagctccttgccagcaaacacaacttccgaaaacctgacagcttccgagtgaacatgtatctctcagcacctgtcgtgcactcgcggtacaatccatgcatctcataaaccttacaccaagatctcgcctgacgctaacgtcgcttcccagagtctttacaagagccttcatacttacagtcccggtctcgagaagtttcatagctcccacccacctcccctccacttggaagaccaatattaaaaagaagctaggtcttgtactacgccctataccgtcgggaccaccgccagtgcaaacagcctgcctatattcaattagaatttttgccatagactggctgggataagcaggccatcatggattaccaggaaatgtccgctggtcgtcattatcttgactccactaagtttcctatatcttatacctagaatcacatatatcatttcctttaattcaatagttctaataccagagatcttgcactgcattttctagcagacattatatctttacatctgtagatatataatgtcattgtcaccggcgacttcatttgccctaatagccaaagttaaataacaataaaggtctacaatttatgcggtacaatgtcagactccaactgctttgtgtttttgatgtcagattctgtgtctattacccagcgtaaatcaactcatgttacatcatggcaccttgacgtctctcagatctcccctaccacaagatctttccagatgacccacaatatacattattgccttgaagctatattctacaaacactgcgatgtatgtctaagcataatcctattctcaaattcttagtaagatagacgagaggacaactagtattgtaacacacacatgcttttctttctctgtacattcaacaaaggatttgtatatcgtggagccgaatcatccaatagatgcgggttcactgggaagatagcccagagccgatgtcgataacattatgtgagaatcgtgttgattaatggaatatacatcgactgggactgggaggttcgacacgctcctgcctaattgcggtgttgttctaccttagacattaggcataaactttttgtcggagtcaaccgtatgtgtaataatgggggtccaatcaatggtgtaaaatcgtctgaattgtcaagttcgtcccccgcgcggtgcgttggctgacgagagatgagaggcattgtttcgggcgagaggtgatgtttttggttggggctcccgatgctatttatcgtcgccatgaccttacagtagaattcgaaaacagactactccgtaccccttggacacacgctttctttcccggcgccccgctctgactgcactgaacctaatccagtaggagttggtctccaccaccttttgtccatgtatttctggtagatcgtcaaaattacggtgattacactttccggcattggacagacccgccttgccggctaaatgactcgagtaagctaagcggtcatgtggttttgcagcccagcaataaatcgtcccgccctagtgtgacgtcgactcaatttccctaacctatacctctctatgtagcatacgaagcgtattaataaaaccatactattttcgtgcggcagttattcgttatatctgccccgcctaacactctaaaggagcctacttgtataatacgcttgtcgggattgtcttaagctgtgactaagggcaaaatttggggataaaatagtaaagaaggaaaaagccaagtagggattcgatgtaagggtatatcggttgcctaatcttaattagaaatggtggtggtggttaaaatagtaatagaagttgtattgaaaacgagttgcgttgacggccggctgacctacccctgactaactaactaacgttaactatgtgataaagacgaggaaaggtatggtcacagtctggatcgtaagtggcttgaacagatattgtgagtaaaaacggagtcacgttcaacacggtgttgttgtttgtacggtggtcaatagctctaattttcttcggaatagattggaggaaagtggcgactagaacttcagctgaactgcggatatcttggaagagcaggaatgatgtgcggtttatatctacgtcatgcactgcagaactcagcgggttcgcttagggttagagcgatcaccatctcctcgggagggccgaacgccgcgaggaagaagaaactgtgggtcgtccgtccaatgaaatcatgatcggcatacaccttgccccttctagatgccaatttaggttgagttcttgccaagatcgtcaatactactgatcagatcttccgcccgtgtacagtagcactgcgcacattgcttcatacttcggagttattcgaaatcaaatttatcgatatctcggcaagttgcaaatttcactgatgacgtagagaaggacgatcagaccattttcatggctcagctgaaaatctaagctgagaacggaagctgagccgcccagatctgtctataaattaagctttatacccctctctcccactccagcatctaccatccttatcataaggtcgaaaaccacaagactcaatctaattcaatccaagccccaagcctaatcctctcaaaatgccagtccaaattgtgcaagagtacgcctgcttttcacctcaactccctgcttatacgactaaccctcatttcttcttttagccccgaggaagttttcgaagctattacggagagcctaaagccagttgttgtgcattactgggctccttggatggggggagagtcgccatttatgcctgttttcttgggggcggatgaaaatcgtgggggggaagagattgattttgtcattgtggatagtggatttattcatcccgcgcatagtccagatgagatgcccttaacggttctctatcatggcggtgaagaggtagattctgctccgtttgatcccgaagcagttgaagcactcattgagggagtataaagagctggaaattgggataatattatgctaggtaatatcattggtatattgatttatgacagcttatggctggagtggtgatttgacgcttagttaacaatactattaaggtgtgaagaggaaagatggtaagatatgatatgattggcacaataaactgtaagatagtatatacgtgaataagatagaaataaagaatgaaagtagatacgaaccactacttttgtgattcctttgactatcattctagaataatagtcttaaactctggggaagcctctaacccattatttgaaaagatctcttatttgatattgactcgtttttcaaaataatcccggttcttcgaaggtatgttagctttgctggaaaccccatcttaagtaaagctggtaatgaatgagacgcgcgtaagatagcgagattcacggagatactaaaaacatgcgtccctaccaggtctagctgtctacaccgtaagcacagtcttctaattataactactatagctgtggcaaacattgagtgcgggatggatggatcgatgattttattcactttgatctcgcgaacgggtgccatggtgcatactgtattgtatgaccacgggcgattcggcaaaggtggtttgtccaatgccggaaagtgtaattaccgtaattttgacgatctaccagaaatacatcgacaaaaggtggtggagaccaactcctacaggcattatccggtatatatgcgaatacgaatataagcgggagcgggcgggagcacgtgcctatagccgacacgtgctcctaggtaaaaattacgtcccgatccgcagagccgcactgtaccgcctttaagggtattgcccccgaatacccaccgcccttgggggtatatagcgaggccttcgggcacgagccctcttcctcttttctttcttcctcagctctctttgcctctggcttagatcatgtgtagtatctgttcttaccagtttaatcgctggtagttctgcattgcagaatgtcatgattattccaatatttggacctcgcgacttggcctctgtgcttgcatacgcctcgttgcacagtgtccctgggcttacactacccctggtcgacgcgaaccctctttttttcatcaactactcggcttgtccgggtatttggagaagaaatccatcgtccaataccccttctgatcttgttgtggagttcctttatgtgtcttgcccctctgcctctgggtcctctctaggcgttgcagactggataatacgagctctacgatggtctgtctactgattctctagactttctgatcttgatttccatgtctcttcgcttggcctcattctagtacccgtgggtcttcgcagggacccaccttggcgatagggaataattccctgcccggtcgcaatcgtcgcccgtaagagatttcacgtgccagtccaaccccgggtcatcatcgtcgcttccatggtccatttccttctttgattcctcgaaagttcttttgattcttcgtgtgttcttcgtgtcaaatatggtccgagccaagcgccaaaacactcagcctttggaggattcctctgtggcccccgaaaccttcaccgacggcctacccctcccgaagttgatcgccttcgacctagactacacactgtggccgttctgggtagacacacatgtcagcgcccctgtgaaggcccgcgaccacaactcgcgcgccgtcgaccggtacgacaaatcccccgattgacattatcttttgaaactactcagatctctaaccccgcattccttgtctcaaacagatggggagagtccttcgccttctatccggcggtgtcgtcaatagtctacgcatgcaaacatcgctcgattccactagcccttgcatcccgaacccaggcccccgatctggcgcgcgacatgctcaaatccttgcatatcatccccactttctccgataaccccgccgcgaacgctaagaccattcgcgccctcgattactttgattttatccagatctaccccgggaataagacatcgcatttctcgagaatccaacagacaagcagtgttgcttatgaggatatgctgttcttcgatgatgaggcacggaaccggaacgtcgagacggagttgggtgtcacattttgcttggtgcgcgatggggtgaccagggaggaggtcgaccggggtgtgagagcttggagaaagcgtaatggtatcaagcgagataccatggaggaatcatgaggatccttgatcgtcttatccgatgattcctacattgggggatgttgcgctgtacacttggtttgagattttagataccccgacttggaatttatgagaaattcggctttttatgcttcacagcaatccttcagtaccgatttgaatagagtaacattcaaagtacatcgtatacttcgacctatccatggatggagccatgcgtccagacattttgttgagctgactaagatattcacccccaaaggcggcgcgatgcagctccaaaacaggaacaccgtgctgtcataactagatctcctcgaaacacacctcctccaacacaaaccaccaacatggcgaccctcagacctccaacaaacacccaccgctcctcatcctcccacagctccggtccaccaaaagcccccctaaaagccgacccaacagcgacaatcgccgacacggtcatcttccaagggcgatacctcgtcactatcggcgcagggacagtcatccacccgcgcgcgaaattctactcatacgacggcccaatcgtcgtcgaggacggctgtataatctgcgagaaagcggtaatcggcgctccgccaagctcatctcgctcaccgtcaccgtccagaccagcaagcacaacacccaccgagtctagggtgtcgacgcctgagcctaagaaagagacatcgacgcggatatcatactttgttactgtcggcccgttggcgacggtcgaacccggtgctcatatccattcttctgctacaatcgaggctctggcggtgattcgccggggtgcggatatcggtgcgcactcgaaggtgtgttctgggtgtgaaattgccgctgggggatcagttgctgagtgggtggttgtatatgggcagggcccgggaatgcggaggaagagagctcgtggtgtgaagggggtgagtccggctgttgttgctgcggcgcaggttgcacagacgcctcttcctggtcctgcgccggcgggcaaggttattgaggatgcgaggttgatggttttgcagaaggagagggagatacttgggagaatgcttgttcctgctgctgggaggaagaagtgatttcaaggtgcctcgtcgatatttttttttgttttgaacttgcgttcttctgtatcggaccagatttcttggattcgtgtcttctagcagcttataccccagtttgtgtttacagtggttagtatatcggaggtcgttacaaggatggtgcacgaaatacctcgcaattgaactatatcaattgagagtaggaatataaacccgtaggaacgccacacattcagtagataaatacaggacaacaaaaaaaaaaaaaaaaaacaaaatagctttctgcatagcagattataacatgaaaaacaatacaccatgcggaataagcagacatagaaacccattcatcgacaggttcccgtcgcatttgaatgaaattgagaatacatcaatgagatagaaaaagatggacaatgaatgctgcctaagacgaggctccaccacgagcctgagggccaccgccgcctctctgtctttttccaccacttccaccatcggtggtagtgtcggggccatcatcacgagagcgcttgttgcccgccggaatgaactgacgagctgaagcactcagattcccacggttagcagtggggctttgagcctgagcgacgttattttgattctggttaccaccgcgaccttgtccgccacgaccgccacgaccgcgctggaggccctggccgcgctggttttggccctgaccaccttgctgctgctgttggtcatgttgttgatggccgaattgctggttaccacctcgaccacctcgtccacctcgtgcaatcggaagtccagactgaagagcgcgcatcagaccaggcgggtttccggcgggaggtttgctgggaagagaagaggcatgctgattttgatcgggttgctgaacttggccgaacggattggctggcgttgcgggctgtgtcccaccttgctgggggacagcaggtccagaagacgcagttggaggcgcggcttgctccggggctcctaccacagggactgaggcaggaacggaggcaggggccggggccgaaaccgggacttgtggcgctgctagtgttggagcaggaccagcgggttggactggtacaggtggcttagcagccggaactgcaattggtgcaggccgagcagtctttgcaatttcccaaacttccacaacaggcttttgtggggtctctgtggcagcttttgataccacatcaatcttggcattcgcagttcggaacctggtgtcaagcatgctgagacgggcggctgttttcttttcgacaagttcgactgccgagttgaccttctccttgagttcattctcatgggccttgatcaatgcctccttttcctcggtcgacttctgctgtagtccagccaatgcggcttcattagcaccggaggaggcttgagcttcttgttggagtttttgttgttcgcgtgccacttgaccgcggatgttgtttcggacgattgtgcgaatagtctcatgcttcgcgaccagctctcttgcttgagcatctgtcaactcaggaatagtaaacccggcaagctcaaacgtctttgacggcgttgcaggggttgcatccggggccgcacctggtgttccaggtatggattgttcaccggcggacagtttctcaatttcttgacgatgagcagccttaacttcgttcagcttagagttgtacatatccttaaggcggtcagcgcgttccttgaccttcgcatcttgttcactagcctgtgtcgctagaagtccatccttctcggcaagagctgcctcgagtcgctgtatcttctgctccagggcttgtatcctttgaatgtcactaggaccagggatttgaactgtcgcggttgggaattgtgaagctggggtagcgttgacgggagcttcttgttcggcagctggagcaggagcaggagcaggagtaggaataggagtaggtgacacattggctggcgcctctgccaccttggttttcaacgcctccaattcgttctttgtagtctgaagttccaattggatgacctctttctcctgcaacgccacattgagctcatcctgcttggccttgacacgcgcgctaaggtccttagagcgtgccttgaattgctctgtgagcttggatcgcaagtcttgcgcacgttcatcagaatgctgcttgagctgctctgggaactgggcgatttgagcctgaagtgactccatctgggtttggagagcttcccgctcggacacggcctcgttcttctccttctcgagactcgagagcttctccttcaactcttgcatctcagtaggatcgacgcggtcgtacttttgaaggatattttgaatacgttgttggtatcggtcacgatcggcctgtagaagctgcatttctccatccttggcttcactctggctctccaactcgtggatcctggtcttgaggggttcgatctcctggaccagttcattctcgcgggcgatcttttgatcacgtacggcctcggtttgtttcagttggtttctgagagtggcgttgctttcacggaaaacgttgagctcattgatagtatccaacagcttactgtgattcaacgcgttgtgatcgctgtcggccgcagcacggcgctgctgctcaagcttcaaccgggtctcatcaagctgcgactgagtgtagtcgagctgctggttgaggcgcttgctttcctgggtcgacaggtggtattgaacctcgacaatttctttctcgcgacgcaagaacttgataacctcctggaggccctcgaggttgggggcggcctggtctccctctgcctcatcgtctgaaacattcattcggtcccgctgtaaggacgaaatctggctggtgatgttttcaagctgcgtgtgaagcacagaattctggtgaagaacctcctcccgacgcttctgcaattcagaaagctcaccctcgtacgtggctcgctgttccgcccagctttcctccttctgagacagatctgttttgtagccctcagattgggttcgcagctcagcaatgtcgagcctgagctggttgctctctgcacgaacaacttgtagattcttcgctgcctcggcgtgcttaacaagctcggtctcatagttttgttgggcatgcttggcgatttcggcctgcgcattaaggtcctcctgatggtattgcgcagcagtgacatgtcgttcattgtcggccttgagacgagtaatttccgactcgaagttggccttctgctcttccaggcggcgggttgcctccgcttgctcttcgcggagcttggtcatttcagtgttagaggtggacagttcagctgagatttcctcaatgcgagtttcgaggtcctgaatcttagtattcttctcctccacgagtcgatcagtctcttcgcggtattgttcctgggtctcggtggcagactctagacgttcttcactggcttggctgatggcctggtagtcttcggccagttgcttggcgtgttctagctcgcccttggccaattctaggtcccgtttcagttcggagacttcgattgaaagttcctgctcgcgagaaaggccacttccttcaccagactcctgatcctcggtaggaccctcggtggtgccggcagacacgcttggtcgcgaattcacgacctgcagacgctcttcggcgctcttgagctcgactgcaagctcatccacgcgggattgtaagtgatcccgggtagtcttcgcagcaaccagctcttcgcggactgcacccaagctggtgaccaaatcgtcaattcgtttttgtgatgtctcctgctcgtactcccggcgcatgctggccttcttagattcctcaacttcatcattgagcttgcgctttgtcgattgcagttcgctttcgagggactcgacgttggcttggagtcgacgtcggctctcggagtcgctatgttcacgctcgttgagaatggtttgcaggtttgcgttcaatgagtctagacgaccgcgctcgttacgcaaattttcggtatcatcgatgagcctcttctcgatattcttccaaagggccttctcggccttcagattggcattttctctctgaaggctctcaacaagacccttagcttccacaaggtcttcagcagcttgctgggtgcggagatcctgtcggtttgcattttcgaagagagaagaataccgcttctggatttcaacgttctcattcttgagcatagtgaagttactctgcaaaagctccgcacgttgggaagcagcagcaagttggctgtttgaccgactgatgtcagacataagctcactgttcttacgtgacagctcattgacctgttgccgcagtgctttgtggtctgttgtcgtttcttcacggaaagtgtcgaaatgggcttgaacttttcggagcaactcagcgtagtcgggtcctgaagtgtccatggctccttggggagcagtaccaagaggcatggattgtgagaagacagacgggtcgtcgatggttggctttctgtgcatgagcatactgcggaatgtgtcacgctccttgacgtaactttgcatctgtgcgctgagattcgcaatctcatcacggtttgtctgcgcacggatccgtaactccttcaactcgtcgagttctgcacgtcgcgtagcttccttcgcttgtgcctcttcaccctcctgcttatcaccaagttctctcaacatacggcggagagtgtggttttgatcttgtagttcgtgaagatctttgaaagttgtgaggtgcttgctgataaagcgaccagtttcattgagatccttcgctgactcctcgacttcaccccgagcaattttctcaagctcctcgcggtcgtattcttcgccatgttttgcgacagcaacttctaggacaagaaccttgacttccgcactcagatcgcgaagttgctggcgaaggatatccccctcgcgagctaggccctcgacttgcccttgccatttcctggcttccttgagggcggtatcccgttccttcccggccgcttcgaggagagtagacatttccacaacagcatggtcgagacgcatttgttctgctcgtccctcctcaatttcgggtctggttgaatcaagttcaagaaccatctcgtcaacggtattccggagctcctggcaggttctctgctcagctgcaagagcggtgcgcattctgtcgtactcggagtacatctgtgtgacattcataccacccttaccacgagatgtccgaggggagaacgagccagtgggagtgccagcacgcatgatgcttgatcgtagaggtgtactaggtgcacctccattaagagagacagcggggcttgctgaccttcctctggcaggttcaaactcaagctgggcaacaagtgcctcgagttcggcaattcggcgctcagcagctcccttgtcgttggactccgtctcaagctccacacggaggcgtgagatttcctgtgctgcgtcatcctttgtcttttcgagagctagttgacattcttgcacccgttgcttggccgtctgggcagcagatccttgtagctcggccaatcggttggagctgtcaagttcaatgcggaaggattcagttgcctggatggcttcctctttcaactgatgaatgctggccagagaagtttcgtatcgctgctctgtttcgtccaagcgactcttgagcgaattctcacttcttcgaagagagtcaattgtcgagtttgcttcttcattttcacgctgaagctccgagatccgagctcccttttctttgcggaacttgatgtattcggcggattttgttttcagttcggtctcgaaccattcgttgttctttttagtgagatccagttcttgttgaaggctctgttcgcggaaacgcgcgctggcagatgcggcattggcactctggagactttgctccgcggtggagagttcacgtcgtaattcgatggtcttcttgtgctgaagcgaaagctcctctgccaatttatcataggccgcagatttcgattcgagcaagcccaatgtgtctctgttggacgcctccaaagatgatatacgcgctttcaaagatgtagtttcggattcgttagacgtggacgaggatttcagtgtagaaatttctgtctctagtgaggaacgcgtagtttctattcaatgttagagaaaagctcgtcagtactgaaaaatatagagatatgtaccagcttcatgcagctttttcctcagatctgcgacctccgcgtgtcccttctccacgctagctttcagaaccttgaccttcgactcattgctgcgcacagaattttcaagctctacctccaagcgaagcttgtcggacttgagctcgtcggattcatgggcctttttattgattgattctaaaagttgattgacaagctccacagttggggcctgccttagggtcgtgagagtcgattcgggaagcgcatagtgggatgataggtagggtagttgaatggcagtttcagccatgttgtcaaacgaggaacagcactgagctgtcgtggcgaagaaatcaagaaaagcaagtatgagcggccctcgaggactggcgcgccgtgtactgttcagagacaactacacacagcgctgggcgagagacctcaggtcatgacgatgtggacaaactagatgtgtgtcttccgagggagaaaacgaaggattgaatgatatagtaattggaagaaatggtggtgagatgacttcaagggcttccgagatccatttccgcgccttggggtgctgagctcttgcacgtgacattctttgtctcgccttcaatcttttaatagccactctcatcgaagcttcactacttgtctaggctgtcctcattctctacgcagctctttttgggtgtattctcttcttttctttcggataatacttaccaccggtacctttgccaagccctgtttgaatcctccagctcgatctggtcaaaccgagtggctaccacctcagctctgtcccattctccccttgaatttcagcgatctccaatccttcgtcgcaaccatgtcgtaccttcagaatcagctcaaaagcttcaacgccagtgtcgtggaatcggcaaaccgcatgcctacgcagcggcgtgtggtcagtaaccaaccgatctctggcagcagttctcaggtcccatcgtccacaccgaccccttcatccactaccgaggtcaaaaagaagcgtcatgacccggacatcgtctactctcaaccggccaatacaggcacgggcaaagatatcatgacgcaggtgctgtttgcgatcgagcacatgaagaacaagaacattccgctcaggttctcggatatcatttcatacctctcactccagcatcgtgctcatgaccagggctacgtgcaggctcttcggagcattttgcagatgcatgagaaggttgagtttgacccgagcggcgcgaacggcgagggcacattcaggttccgcccacctcacaacatccgcaactcggagcaacttctgaaattcctccaagcccagactactgcggcgggtatgagtgttcgcgaacttagggagggctggcctaccgtcgaagaagagatcaaccaaatggagaaggagggaaaactactcgtgactcgaaacaagaaggatgagcatcccaagatggtgtggcctaatgacccgtctctaattgaacacttcgacgatgagttcaagcagatttgggacaagatcaaagtcccagatgtgaatgtagtgaaggaagagttggacaagttcggcatcacacccaccaacaagaacaaggtgctcggtccccgggtgattgcgccgtctaagaagtccaagaagccacgtcgaagtggcaagaccaccaacactcatatgacgagcattctgagggactactcgcatcttaaacggtaagtcagcaagggtctcactttactgttgtcacatcagaagttgccttgatattatcgtgctttgcattgctttggcgtttgggagaaatgcatgcggcctcattctcaccgcatagaaactggtttattactttgacatttgcttcgacagcattgacatttgtacactacacacgtagaaaatgatagatacccaaataaaaaaattaattgattccttacaaccctagctacctcagattccaaagtttcttcatgtacccagttagtccaccatctctctaccctcatgctctcacccgaagacacaagtctataacccgaatatatgcatcaattcatccaaaaaatgtatccaagagaaggcgtagtgatgtacaaggtaccccaaagcacacgacccaacaaaagcgatctgaatataacaacccgaagatcaaatgcaagcccccaatcattgcttcccattcgcagcggcaccagtaccgtcacgacgatccaagtacaccaccaaatcctcaatagtacacaccttaatcccccacttctttccaaatcgcaagcatccatcccgacgcatcatgccattattccccccaatctccgcgacgccctcgacagtctccccgtcctcaacaagctcggcaataacaccagccggcgccttaccagcaagcttgcagaactccaccgcggcctcggtgtgacccgtgcgctcgcgcacgccgcccggacgcgcctgcagcgggatgatatggcctggccggcggaaggagtcgacctgtgccgtgggcgaggcgagcgtgcggcacgtcagtgcgcggtccccggcggagattcctgtcgtcacggattcgtcgctcgagtcgatcgtgactgtgtacgcggtgcacttcgggtcggcgttctcggttaccatttgtgggagcgcgaggcgggtggcgaggtccggggtgatcggggcgcatattaaaccgctgtgttttagaattgtcagcaaggtttttggggtggcttcaagtttgcgcgtttgtctttgagggtgcgctattgcggggagggaagacgggtttcgtcgctgtcttgatcgggtgggtttcgtacctcgaatagcgcaccaggaaggccatctgggcggctgtgatggactcggcggcaacaattaggtcgccctcgttttcacgatcttgcgaatcgagcacaatgatgaattcgccattctctagtgtagggctccgttagtcgtttggtcgttatttggtctagtcggaaggcgccacgagtactgcatgctcgttgtgcatgctcgttgtggtgaaatcggtttctctgtaaagagttcacttactaaatgctgcaattgagtcctcaatcgagtcgaattggtgtgcgatttctgttggtgaaggcattttgatttatttttgcccctcactgcggaatttcaaggatgggtagtttgagatgcacggggttgcaggcaatatgaataagaagaggtcgaacaattgatcaagaaaagtaatattcggattggcctagaatcaagaaagaagaagaagactgaagactgagtcactggctgacaagaacattagaaatgcccgtgatgtcggcgcgggggagccgaaacgcggaccgggcgattgctaagcctcggagctccgaggtctatgaatgtcgttaaatccgagtttcttcccaaattgtagcatattccatagattactgcccagatattggcatatactcgtgtttccgacacatcagcccactagaactgggtatccggatgcagcgggtgtagagaaactacaagccaaaactttgactccccatccagcggacctcatccgcctgcctctcaagcgcacggcgcatataatccccataccgctgctctttctcccaatcatcacgccgtctatgtcgcatctgttcacgtgtagcttcatcgacctccgcatgcataaatacatcatcatcctcgtcaactgctttatcatctgtctccatctcataatccgccggaatagaaaatctgagacgaccaatgcgctctccagtccagataaggagctcatcaccagtaagatccccaccagtaggaagaatcttgcgagctacctcgttattccccgtcgattgggagtgccagagcccacgcggctgctggtcttcttctgtctgtggagttggctgttggctgccctgaccgaatggtatataaggctttgagttattgatattccagcgccggacttctgaacgaccgtctcgctctgtccacttgatgttgccctcggcgtcggaaaagacgatccgattcccatgcgaccccacggaaagtagtttggaactcgcggcgctttggcggttcttgtattctgggttgagggtggatgtcatgttcgaggggctgtggtctttttcgggtgctgatttgagattatagagttccagcgagcctcgtccgttatagtctccgcatgctacgacagaatgtgactcagggtagatggaattcgagaagaccgggaatcgaggcgctggtaccgaggcaagactacatagtcggccgccggaatggactgtggtctgtagctgagggaagtagcggcggtcataacataggatgctggggaagcgccctgcaaggagaattgtattcacatgaggagctggcggatgcaggatagaaagagggccaggttggaagaggggcgcgtagttggctcctttatctaagggttctggactgcgtatgcgagtaggtgactgtccgttggattgcagttggcgtaagggcgaatcagagtgggcaaagatgcctagtcgggaagcgtatggcccggctacctgctcgcatcgcaagctgattgcctcttcctcctcgacggctgacagtctggagtcatagatctgcaggctgagtgtagtggctagtgtcaatggcactgagtaatccgtctcctgagaaagggcaaagatcgaccagggatagcgctgctgcgaaatcacttttaatgtttccaagtcaacttcattgaggacattcccaactgccagatacgctctttgtcgcagagaatccacgctcactccctcgcctagatttataaattccagcgaagtcttggagggggaatgatctcgacgaccagacaggctggccatgagaattccgggctcactgatcccaaggatcttgcctttacttgctcgagagtcagctgagtgtgaattattcaggtcccagatgcagacgctgccatcttcaagcggggcaatgatcttgttctgactggctgaactccagtctttgagtagtcccatgcctttggcctcataggactggcctcgtttcccttcacttttgcggaccgagggctgctcaacccaggataaacatatgggcccgtgacgagcaatgtattccgaataccagtccacatgctccccctcggttgatgagtcccattccgctgccgccctcgccctttcaaaccaagaccattcctcatcagagtctccgttcaccggcggagcagagggctgaataatatcaagcagcgactcctgccccagggtcgtcaatgagacaggagcatcgcaaatcagactctccgaggatctggcagcggagcgggcagcctgccgagcagcctgtcgagcagcccatgactgctcatagcagtgcaatctccattgagtattatcgcgggcgaggtcaaagaattttttggaggtggactgaaggttgaccttttcgcgtggagcgaggtctgtttatcgccgagttatcagttctccgtcgaaatggtgcggggaaggtccggggcttacggtcgatgattttagacagaatctctaccggcagcttatccatggagagggatcaagagcattgagggcagtctcaggaggtaaagtcagccacagggatatcggccttttgttggagattctagactcttttcctgtcggctttcctccgcaatctgcgctccagaccagaccgtcacgcggattcaattcgcatgggacgaacgactggactagatgcagaattgatcgaagtacatgtacgtatgagaatggtctttcatacactgagtgatgacgtctggagggcgctgttgagataacttcagacccgggagacttttccgggtatgggatccactggattttatagaatgactctggagaaagggagaacattctgatatattccacggcacagccacctctcgacaacgatgttaaactaagaaaatgcttatcgttgacatggcagtacgcactcgtgttgttatatgtggaaaatacggaatatccttgccaaacagatcaagatacgttaatatattgttgaagcatatccatccatcttggaaatagaaagtatttgaatgatctgaggccaaactccagcccagcccaatttcccccaccatcaatcagtcataactcgtatatttgagataaattatgtaggcaaaagcattaaacaaacagaagatgacggtctatagaggcaagtagagacacctctactcatccggtctaaagacggcatctttgcaaaggatcaccacctttttaaagaaacgtcgccattcaagcggatcacctttgattttgacgaattccgcttcaaataacccctctgagacacactcaatgagcactttaccctggagtggacacatcctaccatccttggcaatcacccgaatcatggcagaagtatctccagaaccaacagcagggacaatcggaactggaacccccagtcggtggaatgcctcacaaatgagaggcacgagaagcttgagctcccatgcagaatagaaacgtgtcattgaacgcgaagggataatatcctggaacctttgtgcgttttgagttcggctcataggcactgaaggctgctgtgagaactgcgacatagaaggctcatcttcgaggtggcccgccagtgctgcatcctgagaggcaaacttcttcccaaacggctgggttgaagaaaagacatcaccattctgtggactgtcccagtccatcaacataccaccgcccagcatctctggctgtgtcgaggagaagcctgaagttgcgccgcagtcatccacatccataggatcaaagctgcgactcgaacccttcccagatcgggaaagagggtcttgactgaagtcgatatgaagcgattcaaacatcgaggtggcaagattaattgtatctctcaacttgccatcggtcgagaggtatttgtttgcacgagtgtaccaaggatgtcttcggacatcctctagcgagaatcgttttcggggattcactgtcaacatgccacgcagtagtgataatgtagcgggtggtaacttctgccagagctcatcggtggtccgcgactttgttgcaacatattcgtgatactcaaagctatcgtctgtcgggctatcccacggcgtgtttccggccaataggacgaaaagaacgatgccacaagaccaaatgtcagctaggtccgggtgatacccagctcctttgttctgaccccgactactgctgctaattacctcgggtgcaatatatggagggctgccacagaacgtggtggagagtttccgcgttcctttgtattcgaacagcgccgccaaaccgaagtctgcgatcttgagattaccgtcgccggtcaaaagcatgttctcgggcttgatatcccgatgaccgacgcccttggagtgcatgaagctcaccgcgctgataagctgggagaaatagacatgcgcaacatcctcgcccacgccctcgtcggcctcaatcttatcaaaaagatctccaccttcggccaattccattgcgatccaacgccacacctcatcctcgcctgtctgatagaagctgataatattcccatgacctgagacatgtctgtgtaccgtgacttccagttgtaattgtcttgcgctaattttcccatgtcgcgcggcgtaatctttgtggatgtacttgacggcgaaaacggggttgtctgaatccaacgggcaggctttcttaatgctagatagattcaaccgagttagatctagtgcttaccatggatctcgttcttaccatgcataggcaccttggccgatagtcttggacacgatgcgaaacggcacatcgttcgggagcggggccagctgcgaatgttgcattgcgaggaagctggcagggatttgagtggatgcgatcggatggaacggtgaaaacacgaaaggacaggaagtaaattaagattaaaaaggcataacgagtgggaaacaaaataagatgagatgtcgcgtcgaagcaagggtagcgagacgcgggataagacgcggaccactttatcctgatcgggtagtctgttgacaacattggaaagtcacaatacaagagggcgagggagggaatagcttcactttgtctggtatgagacggctctatactgcatgtgcaactatacaatgctctattattatactacgatatgctattaataccttgagcctgcagacccgcagttgatttgacgatcgcactaatttctagtcgattgtttgcttatattttgaactgtccttgtccttatatccagttaatatgactttgattctatattatcgagtataaatagagataccttcctctcaagagccctagggtgcatagagtgcacatgtaaaattcacctaagcggggttcgcgttgcccggggcgtcttaagcgccgagtaaacaaaacttctttttttccttcttcctctttgttcgcgtcacaaattaaatcccctccattctcacctttcatcgatcctttctaaattttcgttacatcaacctccccgtgggtcattgttacggatccggtgtcattccaaaccctcctgctactgttactagcatctagcattccacaacccggaatccacagatctcttactactatttcttaagaacctcgattgcatccgctctcgatccacaatggactatagtatggaagatacacagaactcggcgcccgaggcgcagcaagccagcaagctgaactcctctggtcaaaaaagcgacacccagagcgtgaccaaacggttcgcctccccctccaaacagtctacaaatcagcttgctctttgtggttacatatagctaaccccatctctttgatttgtatagcctgcaagccgagctcatgcaactcatgctctccccctcgcccggcatctccgccttcccggacgcagacggcaacctcctctcgtggacagcaactatcaccggcccgaccgaaactccctacgagggcctcacactgaaactctcctttgcattccccaacaactacccctactctcccccaacagtcctattcaagaccccgatctaccaccctaacgtcgacttctccggccgtatctgcctcgacatcctcaaggacaagtggagcgcggtctataacgtatcgagtgttttgctcagcttgcagagtttgcttggtgagcctaacaagtaagcacctgcccacaccctttataacttctatcatcgctgacattgacccagtgcgagccccttgaacgcacaagcagccgagctttgggactccgatcaggcggaatttaagcgccacgtcctcgcccggcaccaggacctggacgacgaatagaccgttggattttatattttttttctcattctgcatcggcgtcggttggcccgtcgcccacttcattggcggtgggatcgtgctgcaaacgcataacggggctggtttgcgccttggagttgttggtttacttggctatgccctaatttatcttctatcgttattactagtacctctgaacctccgcattcaggtacaagcgtgaggaattcttgctcttgagatcctcgggcggttccctctcgttttatttcttttggtcattcctcctaggatggtagatctactaattgtcgtgctgttgtagatcatttgatcttgtacacgcattcaagattctacactatccgcttaagtatataagcttcgcttgtccacacttcagtatatagttaggggggtgtactttatatcaaggacagagtcccactactaattctcgtacaaccgtgcccaagtaattcccccttaaaagcgaagaaacaaagataaacagaattaggaccgattcagtccaataaatttgaagtcgacgctatcagaattggccaaccccagaaataaaataaaataatacccaaacaaccaaataatcaccccccaaattaagatgtcgtggaggtaccgaagtactgcttctcattggtaatcaacaagccggcaatcgtggcactagtgaaagtgctaatggctccggtaaccatagcactaaatgcaacacgggacacatccttaccgcgaccaggtgcaatctgcgacaggacaccgatctggttaccgagggagccgatattcgcgaatccacacagtgcgtatgtaacgataaggcgagagcggtcggagagatccttgtagtctgcgttattttggagagcgtcgtaggcgacgaattcgttctgtggctgattagaagagggaattattgtttattaagaagggaaacttacggtaacgagcttggtaccaatcagttgggcaaccttgagtagatccccgtcccgggagacaccgaggaggaaggcaatcgggtagcagatgtatccgacgatcaactcgagggtcagtggggggtcgttgatgttcaggtatcggccccaccaagtgaggaggccgttgactagaccaatgagagcgatgatgcacaggagggttgatgcgatcatggcggcgatcttcagaccgagccaggtgccgctggtgaatgcgtggagggcgttggcagagcggtgttcgtcgtcatcggggaccacgacacggcctgcagtaagggtttcttcctcttcgggccaacgtagttttgagactgccagtgaagcggggatactcatcacacacgcgctgaccattgcctgtgggttgacaccgatgctgatataggcgatcaggacacttccggcgatggtggcgaagccagagcacatgatttggtgcagctcggccatggtaagatgggcgatgaagggacggatcagcatggcggattcaccctggccgatgaagggggatgcggcggcgacaacggcttcggcgccggaaacgcgcatgctccagaagaagaagacggcgaacttgccaatgaaccactgcaggatattgaagtagtacaagagctggacgaaggcgacgaagaagatgatggcggagatgacgctgacaatgaagaattgctgtggggcaaagcccttgtcaaagtagtagaaatcctcgctggttaggaatatgactccgtcggcggcgaaaccgagcagatcagtggctaggcttgagatgaagttgaagatgtcgtatcctgcagtggtgcggagcacgaacagagcaatgatgaattgcgccagcataccgacaatgacagtgtgccagacgatcttcttgcggtttcgagatgtgagccatagcccgaagatgaagaccaccataccgaacagactgactgcacggttggcacgggtgttatcctgtgattcttcggaaacgaacgagccaacaagaatcacagcgatgcatagcgcggcggcactgggtgttctgatcttctcgggaatgaggcgcacgaaagggtgagcggtacgcccccagacccagtgcatgggccttgacacgacagtaatggggacatagaagaagattattcgcagcgtgatggcaagatagagcaggaatgggatgagccatcctatatcatgtcggtgtaggatcaggccggcaatccaccaactatgtgaagagtatgtgtgagcctcgtgttgagtccaggatacagtagtaggatcgaagtcttcacctacccggtaaacagtagccagaccacggcatggaatatatgtctccattgttttcccacacgacgataccaagtgcgcttaactgggagagtctcgccggcttcctcatcgtcggagttcttcctgccgtggtccagaggtgtttgttcaggcacgattcctttttcaaactcgacatctttcgagtagaccacttcatcctgacgtccctgttcggcgaaggcggtatggtggtgatgagcatggtgatgctgatgctctggatccagcacaggatctacatggtgaacaacctgcgatcctgctggatcaacttcatgggttttctccatgacgatgcccctccaatcgcaacggaaggtatgaatgtaggcgccggtagcaaatttacaattaagagtgaaactcaaaaatacctcgagatttagaccgcctgtgattgttacccacaaggaaagttgatcttttataacaagtaagggcacagatttagggatctcccattggtattgtttgaccttaaaaacctgttggtttattatttaattattggcatacatattacattttctgggggatgagagataaagaacgcccaccaaggattagaacaagacactagcgtcgggccatctttccttctcatcctgtttggctggaagaatggccatgaacggattgaccgacggtgtacagcggagatcccgtctcgcctagagccagctagagccacctgcagccaaatgtaaccacattgacggcaaagatgataagggaaggtagcattatcttgccacggccacccctgtcgtcttcattgattggtgcaggtcaggctaacttgctggctaacttgtctcaaagtccaggaaactctctccgcaccgggtagttgtggatcaacatgggtcgtgtgcttaatttcccgtctttccgccgacctgagattgttgtagtttctccaggggcgcgtgatacccgagcgcttgagcaagggattggaggctgaacgtgaaaagaaacatatgtaaaacatactacacaacgtgtgtggcctgcattgtgcgttgtttcaaactccaccgatgtctgaatttgcttcataaatgtggcggtttagcgtttaaaaaaattggagaccagaaaggtcgataagagcagaggggtccgagatacacacgcgtggcctcctcagagataatcccccatgtacgaaagataggcgcttcagaagacacagcttggcgtccttggtcatggaaaaacgtgtgatctagaatagcttccaagacctctcaaggttttggtatattagaccattctgtgattgtcacctcgtggcttgggacgttggaagtcttcggggctggactgcggagcacgccgacagttacgtaatcacgtgagcccggggatccaccggactaaagttgaatgtcaaccatggaatgggaagggcacatccacgggtggccagctgccgcgaggcataaatctatcaacaaggtatgttgtacatgcgagacagcgtgttgggtaagaacatatctctggagactgtaaacagcctagtatagccgctgtggttgactctcaggcaatacagcactgtatgctttcaaggacgtaaggttttactgggaaacaaaagagaacaagagtacaaaattctcgacagcgactcgcagtccagaaggtagtcaagagcaggtatggcttatgatctagttaccaactaagtcactgggatccgctggctctactacactgactttgatacttaaccaatgaatgcttattaagttctcatactctttctagtttcatcaataatacaatcagcattctcgccttctaccatgcacctaggcatctacctatttggatagcggtggctgggaaacctgaatctatccaattacccgaacgattgcagaaaagagccactcatcatgcctacagagaaatgtgtcacccacgttgagtgactgttcaagcgatctatttgttatgtttactttgatatccggctatctaaaaagcgtcatataattcgagtcataacagactttgctacgaatactctccatccatcaagactggaaacgagatcatcttttccagtgtaccgagacagagcgagaaccctactagtcagggctaacgtcactccagccgtaacaggatccagctcgccacatgcacatgtgttctctgtgagtatttcgagatgattgcttgtaaagagaatagacaatagattgaaaggcatttaagtgtcagatgaaacaaaaatgaaaatgaaaagaaaaaggaaagtgatggtgaaccactgccgagaagcagtcaattggactagttaactaactaactagttagttacggagtagttatagaagcattcctgaggcatagatagcaacgcagacaccttcaaccaccttcccttaccttcccttcttagtagtcaccccatggtgttctctagcactctactactcccagtgacggccctgctctcatacttgtttcgcaggtagggctgtcagtgcccctgctgtccccgttgcagggtcccctcttcagtatgtgttttcttaccaacgggtcgcacacgtggttcgaattgttcaccccacccttcatcactcatcctcttttgcttctcctccttatgaccgttattccgctggttaacaacagaggttcacaggaggatccgaggccgaagcaatcttaagagactttcgtgacaagatctgaaatgtttgtatcttgagtgcaaatctcgtttcgtgtagagtggcgctgttttgtgaccgacgtggaggggaatcaaggcagatgtgatgctatatgcttcaaaatctgatgaagatggaactggtcagcggaactaggtccagtcaagctcaaacatacacactgatgggatgtgactgacgaggtgacgactctcttttgtatcgagtatcacggcgtacacttcgccgcaaatgtaaggccgaaaggcaatatttgctgcttaaagcaatcagactgcgagcaaggtacacgcaatctgaagagctgtactagaaaagacagggcgaagccgtctctcggtggatgtttgaaggaagaagaccgagaagaaaagtcctggaaatatctgaagtaggggagcaaacagatgttagtagggccctatggctactttcagagcatctagtacgcactgagtttatctctgaatatgttaatttgtttcgatagtgaacactttctatctttcgctttccaggagtccccgagaaccctacatgctaagacatcatatcattcaaattccaagacctgtatataactgtaaatggccattcatgatcagtacatctttatattattgtagacacactcgggcatacgatatccaatagacaaaggttcttaagtgcagtacttagtgaacttgttgatggtaccacctttaacacacacaccggtacagcaatcgccagggagaaggcacgggctgtgagctagtatcgcatgtagcgttagcctcgtattcctaacactctaagaaagtctaggagaggtatcatgatcatgatagaagcatacttgatctgcagcgcttttcaagagggttggtgtccaaagcagcttcggggtttgggacagcagcagcattggcaaacgcagcaagagcaacaacaaggacaactttgaagaacttcatagtgatcttatcggcggaagaagaaaaaatggtaagtgagatgttattagaggaaatgagcttctctttatacattttgatctgattatttcctggcccccagccagcaggccatacatgcaggatcggctatgttgtcctaatgaacttgttcgagttatctgatcttacgccaagccgtcactctccttcgctcggttgcggggccaccaatagcatcaagttactgaatccttcaatttatgcagcttcgctcgattggctctaaagaccgtacaacaaagctaagcatattactcggcagtaacgtctactcttggagcgtatttctagacggagagatttccgtaggcccccaggctatccgggcgacgattctgtatacgagagcttggtcaccttgcttttctcttcgccttcttgaagcctatatgcatagacgagtaatattttactttcttacggcgccaacttctatgcagggtattttggaaggttgaaatatccacgtctccatatcttcgtgagatgcttcttttgtatggcgaagtggaaaccgtaaactcggaaacatggctgatcattgcctagtctaaaagacccgcatagtaccatgtggagaggtgttaccttcctaatccgaggatagcgtactagaagagctattttagcaactgatcacattgtacgttcgaaaaatccactgccagtcgtgatgagaaatctcactatatgaacagaagcaatggagatgtacaaacaaacaaaatcataactgactggtgggtgtcttcttggggtctagatttacccattagaacaccacacctttgacctgagcaaccttgttcagattgatattcttgatcatgatagtccacgcaaatgccagagccatcacccccacgccagcagagagcatcctaacttgtgtatagccgtacgctttctgtattgccgttctcatcggagtaccaggagcatagctcagctgtgtctcgagatcttcataaatcatgtccaggtctttcaagtctggcagataccaagtaagagccttcttgtaagtgttgttccagattgccatagagatagtaagacctgcagaatctccgatggtaccgaccacgttgagcaaggcgagggctgtagcaacatgctggtgatcaacggcagcgagaatagatagctgctcgacaatgatgaagatcgatccgccaatggagatgaagatttgacacatgacctggtaaccaacactctgaccaggacgacggaagtagatcatcaaaccctgggcaaagatgtatagaggaacggaaatgtaaaggagccatttgaagcgaccagtttttcggatcgcccatccaacaaagaataaaagtataccagaaacgacgtcgaatgtattagtgatatacccagcttcggcaatagtgaggtcattaaccacttgaaggaaatttgagaagtagttgttccagcaatagtttgaaagctgatacgtggcatctaagaggcatgcaccgacgacggttcggttcgtgaggaaggagtatgggagcaaaggcgtaggagcgatatacctctcgtagaaagcaaagaagaagagcatcgagaatccgaccacaatcatggcaatgatataattcgtgccccagcctttaggagcctcgctggcaatgtcaaatggaagctcaaatagcacaagtcccgcagtgaagatgaagactccgattactatgatactattagttctctgtggatgaatcagttggtagttcggaatactcacaatcgaattcgagtgtccaaaaccagatgctttgaaggaatgatcgtccactgttctctctgataaccacagcatttccctttttggcttttgtcaggttgaacttcaggacgaagaacaacggcgcggccacgacagggaagatgatggcgaaagtaccataagcccatctccagccagtatgggcgtagaatagatccgccacctttggcccagcaaacgccgtaataatgtacggagaagacgtgaaagcgtatgcaagggctcggttcttcaactgggagagatcggcggtgatgacgtccacggcaaattgcatgcctccgaagccgatgtagtaaaacacctagatcccctattagcacatgttcaataattcatagatattcccgggctgtcttacatttgcagcgcaatagacagcgaaactgttgcaagaggccatcagaacaaggcctacggtggcgcaaattgacatcaccaggaacccttcggctcggccccaggtgtccatcatcttggccactggaaggaagacagcagccgaaaaagcatccgcaattgcggtaggaagaccagacaaggagtgttgttggaaagagctagccacataagtgctcaagctgccatcgattgacgatatccaggcataggtgaaatagaggaaccacatactattgaactataagattagcgatagggctgaaaagcgggtgaattgacttgcttactttatgaaaacgaagatcagggagactttcgaccaggtctgagccacagcctcaacttcctgaataccatgttgaagctcttcatagggcacacctggtagctcggcaccattgtttggaagtgtatcttcaggatggctgattgaaccctctgacttctccgcctctactgtgtttctgtctacttcgaccgaagaagaacttgcagcatcatcactgtcgactttcattcgacgaaagactgcccgagcccgttgtatcaagggacgaagcgtcatggcaatggatataagactcaaaattccaacgactcagagaggttgaaggtttcaggaagattttgaaaccaagagggaaaggcaagtaaaacaagcgaaattcccacatataaagtaaaacatcgaagtcggcacgtcggctagtagtattttgaacgaccgacaatcctttcctcctagatcaaaaatgttacaacatgcgtggtattaatataatgtagtccaaacatattcgttcaggccgtggacccttgctccactggggcctgcgacaagatctaatcagatcgtcagtggcttagagatctttaccacatccagttaccttgatcgagacccatcaggcccattcccttccaacgtcagtgtcaagcttcgtatagctgcttggaaatgtaccttggcattatgggccggccatattctctcaaccggaaaacacgggtcgataaaaatcttggaaagttatcagatttgccaagatttcgcattcatgggtaaacgcgtaaaattgatttctttcccctttcctacattagaatggacgtgtaactcaccaataggtcagccatttggctaacatatacgcaaacagccaagatctcgccggatgagaatctcagtacaagcctcatggcgtaacttaagccacccttggctcccctcatgcctccaccttgaacttttttttgagattaaggtgtttagcgttttttttttgtacgcaggagtctacataatccgattggccatatataattatgcgtgcatcccgaggccaattggaccgacactggatgttgtaccttacaacgcctgccggaaaagatatcttccggtatattatatttttcggtcaataacaacacgcgtgttttgtacacgttggcaagaattagtcactggaaagtcgcgatttcaacctggttcgatctcctttgatcagccttccggtggatcccgaaaatgactattacatattgctccgtctggatatgcattctcttttcgggtttcgacaagtaaaccacattcaaggccttgcctggagtatatcgatgcgtgagattgtatataaataccgccgccgcataacgatcgcctcagttcatcaggttcttgctattttggcttgcaggcagcaaccacatacactcgcgcaggcccagcttgtcagctccggacgaaatcccagggttgaaaaattcaccttcgtgggatcgtgtgcactcccgctgtaaacgtcaaaatcgaccgaaattcaaccatttccgatggtgtagactagcacagcggatgtaggaatatagtaacggacgtggaatcaagccaatatggctgttagattcgacgagatgggctatctttagtatgagaccatgacaatgacgtgaaatctggctgctaatgtattgcagccaacctccgaattcctaactatctcaatgtagtgtatcaaggccatcctaacttcaccctagtagaaatacaaacgtatcggggattggatgttcttgtaagctgtccatacgataaatgaggcgaagctcctagttcacgatcaaagaaaaaccaagagataagtctacaacatatgtacataccaccactttaattcactctatcttacatgattatttggtcagtggtcgttattgagctgttcattttgtcgcgagtaggaccggcttctcgatatacctatccacactaaaggatcaaggtatcttttcctgtacaccaactaataacatggaaggctatcgcacttcacctcattcgcagtttcgattcaaatatgtttccagtttgcgccaatcaaaagtagacgatacactccaaggctaccagacgaaaacggatatggcggggagcgtaactttcccctctcgacaatctggtcccactctgagtgtcgactctacaacctttttgaatcacttcaaatcatggcaaatacagagaatgaatgggaattggaggagggtatccctcagtttgaggatcccttcatccaacagtatctgaaaggacgcgatgctttaattatggaagagaaaaagcgacgtcatggtatttcccactcaagtcaagtaaaaaaacttcatatctgacttttgttgtagatgcaaatctgcgcaaatctttatcacctatcgccgcccgggcgacgaagattgtgtcacatatccgagctcaggaacagaacgagctgtggtcaagtggattgaatgagaacgcggcccaccaggcagatgaaatcctgtaccccggtgtcatgttcaatctggccaaaggccgcatggagacgactaaactatggaaaatcgtggaaaagatgcccaagggttctctcctacatgcccacatggaagccatgttcgacatggatttcttagttgacctggcattctccacgcccggcatacacatgttagcgccgaagccgttgatcacagccaaagattacgaaatagcgcccgtgtttttcaagtattcctcgcagcctctagaaagatccgaagacaagccaagtatttggtcggaggcatacgaggcctcgtcattgatctcgatccagaaggccgcctcctctttccctaacgggggagagaagggtttccgggaatggttgaatactcgatgtgtgcttatgccagagcattcgtatcaccaccatcacggagtagacgcaatttgggctatcttcaccaagactttcccaattgtcggctctctcgtgatgtacgagcctatcttccgcgcctgtctcttccggttgctcggacagcttgccaaggatggagttcgatacgtggagttccgccttgcatttgtcttcgaattccgaacggaaggaaatgaaaaccccgaagaagactacttccagtggtgtcgtgtggtggaagatgtcgtggctcagttcaaacaaacggacgaagggaaggacttctacgatcctcgcattatttggactacgctccggtggtttgacaacgagacgattgtcaatagcatgaagcagtgcatcgaaacgaagcaggagttccccgctctgatcagcgggtttgatcttgttggtcaagaggataacgggaggccgctagtcgaccttgttcccgtgctcttttggttccggaagcaatgtgcggaagaaggcgttgatattcccttctttttccacgctggagaatgtctcggcgacggcgacacgacagaccacaacctattcgatgccatccttcttggcactcgccgaatcggccatgggttctcactttacaagcatcctctactcattgatttagtcaaagagaagaagatcctcgtagaatgctgcccgatttctaacgaagtgctccgccttgctagctccatcaaatcccatcccttgcccgcgttattgtccagaggcgtccccgtttcgctgtgcaacgacgaccccgcaattcttggccacggaaggaatggattgacacatgatttctggcaggttttgcagggacttgaaaatgtggatttagtcggcctatcaatgatggcccagaactccatccggtggagctgctacgaagaccagtcgaccgccgagtggaaagctggtattcaaaatggggtaatggggaagggactgaaatctgaacgtctgcgggatttcgcttcgagtttcgagaaattctgcgagtgggttgtgctggagtttgctgagtacgatgttgatgttggggatgattgaagttctgtgtccaaaatatacgagtcatatacttagtaacctagcacgaacaataaccaactaactatgagaacacgaaagttgattttggtaatatttcaactggtgtaagtgaaattttatcaccatcgaagtaatttgaaacagacaactcaatgagaagataattggtcaaatctggtgtcaatcggtgagttggcacgtcggcgcctgactccggtacttatcgcgcctttatcaggtgcccggaacgtcattgacgaacattccctccgtcacgacctcccatccactccgctttgtcggagctggctgatttattgtgtttgttaagctattttcgatgatccgagtcggcacatgaacgagccctgtcccggctcccagtcacgatggcgtcgtactttatgccatcgttcttccagaagcggctcctcaaatatgccctctctcgcctgggcctggtcgacacagaggccttggatccagataacttaggtatccgctggggacaacggtctatcatcgagttgagggatatcggtctcaaactagaggtgagtgagtgggtgcagtgagcctccgcgggcggcggggcggcctgtcgtgatcatcgaacccgacctacagagcagtgcgggctaactattcacatcgcggaatagaaactatcgacgatactcaatcttcctccgtcgtgtgagctgctcagcgcccgtgttcagcttcttcgaatcaccctccctgccgatttccacaacagcgggatcctgtgcgaggcaaacggcatcgacgtacatattcggttattgtcagaggagccgaaaaaggaacaaaacacaaaaaataaaggcggaaaagatgactattcggcggtgcccacaccatctggtcttgcggagtcattccttgagtccgagccaaaggaggagagggaagagctgcaagccgcaatagcgtcacagtcacaggtcctgccccatgacccactagcctggtctgtcgatgacgatgacgaacttggcctcgggagtgatactctatcactgccgagctttgtggccgggttcttgaaaggcgttgtggatcgactccaactcaagataaaggatgcagttgtgcgagtagatatggagttgaagcaagatggaacgtcaaaacggcagcctgaacacaagccggaccttgtcgcgggtctgctgagcgtcggggaaatcgatgtccacggagtatctgagaaaactgttggtccggacgaggctcttccattccgacaaggaaagcggttgatatcaatcgccgatatcaacgttggtttaatttccgacccatcggtgttctcgaactactctaggtttgctgcccccgcatccccatcgacaactatgcgatcaaaagggagcgagccgtcaagcagagcgtcatcaccctctccgttgtatcgctctgttgaagaaccccttgctatgacccaatcaactattttcgagccgccgcaagcttttggtcattcaagtactacctcggacgatttggaggcatctgcattttcgcacggtcgattctcagacgccgactccgagtcaggtagtcaccacggtggatacctggaggattctcatgtatttggagatgaccccttccaagacaatcctgggtacctagactcggttatagacactcaattcgatgatttcgatgatgagcagtcaccagtaatacatcctgaggaagaccaacggttcaggaatcaatggggaagccacatgtctcatggcccacaaagcttgcaccacagccaacgggcggaatactctgatgagcccttgcttccgtctgacagccatcacatgtcccggacttacgaaacacataacggccaaattggctctgaaattgacgaaaccacgccactcacgcagcattacaacgattacaacgaaaatgaacataatgaaagatcacaattgagcgtatcatcccattcttctagtacatctccacgcccagagcccgagagcacgggcccacgagaagaaaccccaaatgtcgatctcaacgagtccaggcttttctctcatgatgaagcgcaaagcctttacatgagtgctatcagtcaggatgtgggtgacagcttcatgcctcacataccaggtggatggggctcgtttaatcgtggatcaaaatcccgaagtgctttggatgaccgatctaaaataaccgcgcccattgacccggcacagtccatccaagttcaagatgaagcaaattcaaggtgcgcatctccatcaggagacaatgtcaccgagggacatgatctggacgaccaaggccaatctcagacattgcacaaggacagaccctcaacttcatcgtctcctgggttgcacagaatcaatgaaatgaggaagtcgatattgactgtggataagattttgatgtggttttcgcctcctgcttccgaagaagaggcgccagccctgtcctcgcctgtgccgcggaaagagaacgcagagagtgacctaactgaatccacagttagctttggtgactctgcaccagaggaaagtctacttgcctctagactttacaaatctacgagattcggaagagactttgttgaggcacgggcccagtcaagtgctggacctgaactgcctgaaattgcggtggaagtgttctctatctccgtacattttgatattgcaactggttggctcctaaccaagataggacaaaaattgtctcacgctgttgatacggccgaaaaagatatgtctgcgaagcagtcacgaaaagaccagccggcgcgcacaccacctgttcatcttgccgtccatgcattttcaataaaattcattgaacatgttccagggcatgtgtattcgtccgacgataatggctcgtcttcgtctcctccctacaacatggacgatgtgatccttcgtctttccttatctggtctagatgctcgtctttcagctcaaagtgtaactaccaagctgaagcttcacgtgtccaagtttgcattcgggttcgcctccgaggatatcatattctttgatgaaagattgaagatgcgtgaatctacgcgtgatgttttatcaccttcgcagggagatatttctatctctttggtcaagtcgtcagacctgaccaaggttgacatctccacgctacctctccacatcaatctcaatgtacagcggctggaagaggtcctaggctggatgggtgggctgagtaccattcttgaacttggaagttctatgtcgtccgtgtcaacggttaaaggctgcccgccacctaccaaggcgcgcccacgtggtgtgcattttgagacatctgttccagctattgacaccaccaagggcaagtcagccccattgaaaatcaatgcccgagttggtgccatcctgttggatgttactggtgaaacccattgtcttcaacttaccacgaccgccgtcaaaatcgtcagcagatttgaagggattggtattcaaatagacaaggccaaggtgattggtccactttcaattgatgatgcttcatctgatactcccgccaaaatcacccttaataacatccgccttgaattcctttttgccccgaaggaggtcgatctcgatcgtcttttgacattgatcactccgtcccaggacaaatttgaggtggaagatgatatcatgctagacacgctgttgcgccagcgacgacaaggatcagttcttcgtgtgacagtcggacgcttagaaacgttcatttcagataccagcggtttagagcctctctcgtctcttgctgtcgagctgagtcggctttccaatgtcaccaagtatttgccggaagatgatcgccccggcattctcactttgatgctggtgcgtgacttccaaggacatgtccacgttggcggagaagtcggagacctcaagagtcaactcaccgatgttgaagtcgcacacatcaccatgccttcgctcactgcggtccaaattggaaccatgaccgtcagtcggaataacgatgaagagctggtgggacaagccctgtggccgccgaacaggtgtgaggacccagaccagtcctatccgccggtcctcatggctcgtttcatacccgatgaaatggatcctacctacaagatcaaactgcacaatctccttgtcgagtacacggttccatcagtgacggccttccttggattgggtggcaacaagatgagcggggatctcgccagtagtatggtcaactctattgccaaccttgcagagcactcgataccgtcatcctcgatgacaggacgacctatgtcgactgaatccagctcctcgacaaaacctgtcaaattggcagtcgtattcagagattgtgttattggcctcaacccccgcaattcccatgcaaaaggcctcgcagttctcaccaatgccaagttcggaggaagccttcatggagacgaatcagcagaagcatcgttggatattagaaaagcctcgctcatgatcatcgacaacgtgtaccatgaggaggcctataacctgcaccaacgaggatcggtcgtttcccaagacacccaggctcaagcgtatatcgataaaggttatgttcctgtttcttccatctcatcggcaactgctagtgtcaagcttaccagcgcggaggatgggacaaagtctttggacgtagagttgagagatgatctgttgattctcgagacctgcgcggattccacacagacgctcatcagcatcatgaatgggctacagcctccaactccaccgaacgtcaatatgaaatatcgaacagaggttatgcccatccaagatatgtttgcttcgttcaccggggacgcatttgctgctaatccccccatttccaacgataatgatctggcaactatccccgaagggtcatccggagaagatcagttgaccgacgaacttgaatacgttagcgatttctatcccgtgaaaggtggccctggtggtgtgggcgttgagggcatggaagcgggctccaatgatctgctggacagcttccattcccaataccaagtatcgtccagcatgacggaattggatttccaggaggaccattttgcaaagaaatcagctgtgggtggaacggcacatcgatgggattctacccagaacacctatggcttcaccaacgacacaaagctcgagcggagtcctttgcgtgtgcgggtgcgagacgtgcatttcatctggaatctctttgatgggtatgactggcagcgcacgcgtgacacaatatccaaagccgtcaaggacgtggaaatcaaggccacagaacgccgttccaggggctcgcaagtgtcacctttggccgaagatgaagaggagtctgtcattggcgatttcctcttcaactccatttatatcggtatcccagccaacaaagatccacgggaactccaccgcgagatcaatcatgacatcgatgatttcactagtgagaccgggagctatgcaacaaccgctaccctgactggggctggaagtcgccagggccggtcaggctctaagagggagaagaaattgcgcttgcatcggagcaaacaccataaaatgacgtttgagttgaagggggtctctgccgatctgattattttcccaccgggctcggaagagacccagagctcgttagatgtgcgggtcaaggatctggaaatttatgatcatgttccgacatccacatggaagaagttcgcgacctacatgcgtgaggctggagagaaggagagcggaacgagcatggttcaccttgaaattctgactgtaaagcctgtgcctgagctcgctgcatcagagattgttctcaaggttcgttacccagtaaaccataattcagaccagtactaacttgactcttaggtcactgtcctaccccttcggttgcatgttgatcaagatgctctcgactttatgagtcggttcttcgagtttagagatgaggccgccgaaccatctgatactccgggcgatgttccattcttgcagcgagtagagataaacgccgtgcaagtcaaattagacttcaagcctaagcgggtggactacgcaggactccggtccgggcgtacaactgagttcatgaacttcttcgtgctggatggcgcggacatggtactacgacacgtgatcatctacggagtgtccggattcgaccgaatgggccaaactctcaacgacatctggatgccagatgtcaagcagaaccaactacccggcgtgctcgcgggtctcgcgccgatccgctccctagtcaacgtcggcggcggcgtgcgcgacctagttgtcatcccaatgcgcgaatatagaaaggacgggcgaatcgtgcgcagcatccaaaagggcgcactagcctttgccaaaacaacctccaacgagctggtcaaactcggcgcaaaactagcgattggcacacaaaccgtcctccaaggcgccgaggacctgctgactcccaacgcaccaaccttcgacgacgactccgcggacgaagacgaagccaagaagatctcactatacgctgaccagccggttggagtggtacagggactgcgtggggcgttcagtggcctcgagcgcgatctacttttagcacgcgacgcgatcgtcgctgtaccaggggaggtggtcgagagtgggagtgccaaggcggccgcgaaggcagtctggaagcgtgcgcccacggtcatcctccgacccgctatcggggtttccaaggctgtgggacagactctgcttggtgcggggaataccctggacccgagcaatcggcgcaagatggaagatgtaagtgatctccgcggagccctgttttggttcgtggctgtggctgactacgattttagaagtataaacggtactgagactgagagtgaggtgcacgaggggtggtttggcccttgcatacttcgtacatacatgcatatttgttggttccttttctggtttttgatttgattttgatttttccgagttcaggttactttcctctttgcttcagttcgataccacatcacgaccgcattacaatcttaaattgctcttgcttgttctttcacatacttccagggattttcagtttcagtctatatgacgtgggagtcccgagttcaataaatgatcgaggtcttaagccagatctattgctacggatccaccaagtaccagaaccagaagaagatagcgaaaagcgatgtcgatcgcagttcgtacaacgcggtagcgtccgagtatactccttgaggcagttgccaccatgaagactccgtaccacattaaatcactggaaaattgtgtaagtcccgacgatcacctaggcagcctgtcacctgggcagcctggggcaacgagccagcaatctgtttaaaattgcattctgcatgctgcatgtgaaacaaatctgggggttgcagtaacattggcagatgacttgggcacaattaaagatgagctggcatgccgatctatgtacttacagccaacgtgtgcatctgcatgtgtgccttgattctctcaggtacgagggtacctcgtacgaggtgcccaaccatggaacaaagatcaagagtccaagtccagtccaggccaacagaggacataatgtatgtgtacgtactattccacttcctcccagccgaaagacgacacgaatcagccattgcgagagtccagatagacgagataaaacccgtggttccttgcggactgcatcaacggtgcatcactgcaaagtaccccatacatacccaaggtacggataagccctgggaaggaagtccgaccatgaccaagtcatgatgttgccggtggagaagggggaaaaaatattttcttttgccacatttgaagtcgaaccggatgtccaatcatgggggctggaccccacagccgaaaggaagatttttgcctggctcggtcgtgtgctaagacacaggttcgttctgttcgccgactggttctgggctttaagaggcggttggtgaagattagggattggggtggatgattggttggaaatagatggacgaaactaactaacggactagactaaaggggagatcgaggctgagatcatctgcaggtgatttgggcgcgacagaatattcccttactagtatcattcaggcatcctagcatataacatagcgtataacatggttctatcaacatatatcaacataacatccctatacaaagatgacgtcgaccagttgatcgacgaaccatgggtcactgacagtccggtctcgaccttttcctttgcttttctcttcttcttcgttggatcggtagggccggcttcccctggcttttaactagttcgactgggtcgatgggtcgagttcgactggctatagtatactcattgttcgtgattgagtggatatactctgagatccaggcacattccgttcgtcccggtttatattttctttttcttttcaacataaaattgctctccctgcccttctgtaccttgcagtcttgtttattgtgatccattgacatcttgcgaccggtaagcctatctcctatcccttgcggcctgaatctgacgaatcaagttcagtgtggagaagtgggtttggatctactgcattggatatgtcgacaatctaaagagaggtttgagaaaacatccagaagcaggccttcaagcagacacgcgaaatcggggatattcgcaattccaacatgaatgaaatcctcaaccactccgccgccaacgacatatggcatggcgagctgctggacagccccctctgccacaaatgtctcgatctccatgataaccatgcatgtactactcctctttccaaaccttttttggacgcgggagacgctttgtccctcccccctcgatccatcaaatctcgtatcacgggagacctttccatccacgactaccacaagttcctctccaaggctgcagaccgcattggcgatcccgtcgatcagacaggaaagaaattgaagcgaaaaactgctgcgttgcatttgaatcgcccgtcccctctttccatctcttatcctgtatctatatcgtccgtggcctcgagtcctccgccgctgtctccttcctgctcgcaaagcattgtctctcattggagtgaagagcctgagatcggggaagcccagactggtaagcatctatgactatccggtcgattctctcgagcatttattaacacttcatagttcagtaccgatctacacaaagccctggactccccgttgtctcagatctcgggaatcgtgctagacctaacaggaaacgattggtaagttggctgagacactacacaaagacccagctcacttattatagtccaagaatacctttagggaaaagctccagcaaaaggcccaagttcaagcggaagaagaaacagaaacagaacctgagtctgcctccacacctcaaccctcggactcaatgctggccagtacgcaggccgttgccaccgtctcacacggtggtgcctgctttgagatcctgaatccgcgcaagtcgctggatctagcacgcatcgtctcatacattgaagacgtcgataattgctccgtctccacagacaatacccgagactcgactttttccatcgagcaaggactggaccgggtgtccctgtcccaattcaccgatgcctcattgccatcattctattccagcaattcgttgtacacctctatctcacccgatccctcgacagccaaaggtcagccggcggatatcacctccccgcgagtcggcgaacgcgtccggtctctatcagactattctgtcaacgaacaaagcttcaactactggagccgacctgcacagagcactgacaacgagctacccttcgaaactcatgactacccaagcagcggcagagagggcccacaatcaccacccatggctcccattacggaagaaaccagccttccaaatctagatttttcccgtcgaccttccaccccatccacgcagaccttctattcagaaagtgagatcggcgagccgggctcacccgtctacgcaaacggagattgggctcaagtcgacgagcgcgacagaggcatcttattcgacgtacgggaagacgaaacaacacccgaccactaccacgactattcatcctcacaagaacatcaagacctgccaacaccccgcgaaccgcatctcgagacaccaagtggttcacccatgcactcgcccatgtactcctccttcgactccgcctacccctatccaacctcaatctccactaaacccccttactctagctccttcgatcccttcacctacgacccggtgtacctcgacccacacgtccagtctgttctcgcagccgcgaacgcagagacgatggggttacggggtaatcctgcacgcgcactggatgagctgcagcgaggggcgcccccccggcgccnnnnnnnnnnnnnnnnnnnnnnnnnnnnnnnnnnnnnnnnnnnnnnnnnnnnnnnnnnnnnnnnnnnnnnnnnnnnnnnnnnnnnnnnnnnnnnnnnnnnnnnnnnnnnnnnnnnnnnnnnnnnnnnnnnnnnnnnnnnnnnnnnnnnnnnnnnnnnnnnnnnnnnnnnnnnnnnnnnnnnnnnnnnnnnnnnnnnnnnnnnnnnnnnnnnnnnnnnnnnnnnnntgccacccgccggcgattcgagttccaccggagaaagagtgatgagcggaagactcagaagaaaaggctgaggaagttctttggttggaaatctgggcattagggagttctgtgaacttgccttgtgtccgttacagctggattctgtgaatcgacagctggctgtgtggtgacttttggaccgggaattcgattatgatttacgtccattatgatggaagagcgaggcgcttcggtgttggattggattggattgggtggactggctggatacgggtctcgattcttttcttttgttcttttctaccgtgtccttcttactactcttattacactttctttctgggtctgagactcacattgtatctatatcattttacttacattgacgcatgtcaacattccggttatctcaaacttttgaactcaatcattatcctggaatagcagtaacctttgtaaatgtccacaggaacgggtctactaacgcagatcaatctccaactccggaatatttctttctttatttcgggtatcaaatcgaggtatatacaacgccatccatggaaaccaaaatgcaacatcaccaaccttaacctaatctaaacccaacccaccccaacccaacccaacccaatccaacctaatcatcatccctctccaccatcgacgccaacgccgcactaacaagactcttcctccgaagaccctgctcattcctcttcccaaacccataatggctcttctcaatgcgactcgccaaaaccccagcggaagaactcttcctcctacccctcccctccgccacaccctccggcccaaaccgactccgcgacagcgcaaccgctcttctccgcggcgacgcccgcggcggcaacgagctgggatgacaatcctccccgtcgcagaggtccgccgacgcagaagggtcctccatcagcgagcgctgcatggcctcgacctctgactcgttgcactgcagcctagagatctgctggcgctgcatgcggacgtcatggtggtagggatgtggctgggggtagaaggggcgttcggagccgaaagctggtaggtcggacatcaggtgcggggggaaagtcgggcttgttgttgaggaggcagagggcgaggagagacagtcgacaccggagtcgtcggagtggtctgtgtctggtggtgtgaggacgtagcctgcgcccggggagcgccgggagccttgtgtgtgtctgctggctcggttttggtcgcctagggtgtgttcgtgcagtttctgcgttagggttgcaatcgataggcgcttgtggttgtggtctgagtcataggggaaggggacggaggttgggggttgttggttttggctttggttgcgggtgaagcgcgagcgcgagatgttgcggaagcgttgggattgtggtgagggacagcgtgaggagagtggggagattaggttgctgtcgctgtcgaccattagccggtcgtcggtgtcgagggcgaggcggtcgggtcgcgacgacggcgaggtgaaggagaagttttcgaacattttctttcggtgcttcggaggcgagggcgacgtggcttgagggtgtgttttgaatattaaggttcttgatctgcgttttctttgacggtaatgttgtcggggttgtcggcctttgagagttgcgatgtgggtttcgagccggaaattgaccacctacacttggaggtagtggacacggtttcgcacagtgtctgatcttcgattgatatagcgtagacgattatttgcccctcgggggaaaaaaattggttgtcgaccactggttgaggttgaggcaaatgtccacgtgatcggcaaccactgtgcggcagcgttagcacagacaggggtattttttctatttttgttgatttggatttttgtatcaaatcaaagcatttaagcagtagttcggtttcaaattcaatgcaatgaatttcttcgtcttttttctttttcttgtgcattcccctgcaagacttgcaagaccctggttcttaaatgcatgtcgatcctcatgtggatacccgtgccctaagtcgatctgcatctgcggactgcacgatggatgtacggcgtatggtgtagtaagtagtgtggtgatcttgatcagatatatattcaatcttgcattgtttgcatctgctggacttgcctactcatataactgggatttcctggcaaaatcatcgaactatgtactagacacgagatatatttgtgcttcactgaagtaaatattattagaattttactctggcgactcaacgcatgtacaacagataaatcccatataatattacgccccaagtcagtctagttgaagttgtgcatccaatagatataggcattgtaaggggtagcgaccataatccaagtaatcaagttgaagacatatagcaaggaacaaacatatgaactcaccgtaataggattaattctggattacgtcaataaagcgaattttctgtgtaggtgcgaagaacaaagtgattagagtgtcatatcattcaagctcgctgtttgtaatagaactggatagaatcccaagtgggttagacgataggggctatgggtgtggctaaacaatgctggagtcatgtaggtagaactaaatatgtggttgctgtataaagctaaagctcagctgggtggacacaactgggaggtcgaggacgtgatggggcctaggacggactggacgttggttaaatatcaaagtcagtgtagcagaagtaaggacacccagtggcctagttggtaagtctatcgagcagtaccgctctagactaccctctaggtcaactgcctggtttagaacactgtcgagaatttcgcactcacggctctgggttcaaaccacttgtccactttttttatcctttttcttctctctccctatattagaccctctaggtcaactgccaggtttagaacactgtcgagaattacgcactcacggctctgggttcaaaccgttcgtccacttttttgatccttttttttctctctccctacttttgttatatgataacagttctatgcttttcctacgcctttaaaaagggtagatgatatttgacatgacattctgtattctgtcaaggcattcactgtatgtcaacaacatagacttcagtatcaaaatgtgcgtcactcatcctattgactttgaccttggcgttctcggtcacagaaagacgtgtggtctagaatgaatctttagtctaatgcatatagtagttgactctaacatatcgctataattttacatggaaccatatatgataaggaaaaggaagttagaaggaagtgagggaagtgagagaagtgtggtgaggcatatacaaggctacgtgccgcctcgcttccttctcatctccatctcttcacttgcatactcgcttcacagtatggcagctgaacttcctgcaaaccaattacgtcttatttcgccaaaaccaagccctgcagatttctcacctcgcaaatgaaagacgactctgtctcccaaatccatcctttccaaggactctgtgctgttcttgccccgaagttctcaattacagcccttgtctgctctacctggatttgattcaaaatcattgggaagtgataacgatactttcagaattgaaaagctaatgtcagcagatctgaaatctcctccgtctctccaaccaatgtttcctggcgccatcccacattatactatatccatcctgatcatgtaacagagcctactttacctgacagacaacccaaatgatgcgggcccagtcatccgctttcgctatcgcagtcgcgcccggatcgagatctcgcaagaccttgaatcctaatcaccgaggttcaggtgtgactatgatgaagatgttatggataacattctcaacggctgcaaaatgattcttcattgcgaccggatgactctcaacataatacgttaaggccaggagtgaaggctagctccggtgcaaaaataaaaggaggtccaaagccttcctccttgggcgtccttattcggaatcttttgggctctgggttcataaccgctgctgcccaagggttccattcgaataagaccgattcccacattcataccggtggcagagtaatcggcaagcttatcatggaacccacacataggttgtgttgttaagattgacgatgcgtggaatttgtgaacgaaaacacctcacgctagctactccattgactccactccaactccactccgactatttgtttatagcccaatatagaactttatacggagtataccctattgtattccagtaatgcttctaagattcatataatgtgagggtgtatggttggataatgtatcaaagagacacgcctatcgaacgagacaaaattggtccagaacatttccaaccatatgcccttcaattaaaaaacttatggattcataactcatgtttccatagagtgtagtataaaatagtgggctgttctgtattcgcagacaaataagttggttggttaagtatcaaagtcagtatagtacgagcaaggacacccagtggcctagtcagtaagtctattgagcagcgcctgctctagactaccctctaggtcaactgccaggtttagaaatcattttccttctctctccctatattagttcctaaagtataaaggagtatagaaaaccaataagcatccgttggtaacttgatcgaccatgagccatactgctctaggctatactctaggtcaaccacctgcgttcgaaccccctgcgagtcgcagtcgagaatttcgcacccacggcactgggtttgtacactctctttttccccttttccccttctctttagtctatatttccttttgttcctcatatcaccttttgaagtataacagcatggtatggcctgcatattagatacctgagccgtatgccatcgtcctgtatgacttggtggatatcctcctttctatttgatatttatacttctatctgtttctcaattagatgccacaaatcttcaatcaaaatttcttgggtaaagcacgcatgtctataaatattcatggccttccgggctgtagataagatattctatgggagctgttgataataaacgcctgatggctctgccgctactcaaaccaaggttttgtcccgaaggacgagaccgaaagggggaagtcaggttcaaacaaacctcaatatccccttcacgcactcactcgtcttcatcatctggcaaaatattcacccaatattttctggggaagaggagaggtgcttgtggctggggaactgggtcttgcccactagccgcattgacggcttcggctgcagcttctatttgctgttgtttgggttcgatatgtctcggtgcatacccttggtcttcttatggcctagtcgccggcatgactgtttggcccttcgggggagggtaggatcagatgagggaggcgaaggagggtatcgtgcacctgaatattgtcagtctaaacatccaacatgattgcgacgagagatggagtattgacagcctgaacacgcgctttgcagagatggtgatgccaatgaagctggtccttatacccctgcatccttcgtcggttatgatatgcctacaacttcttcttcgctggtgttcttgggctccattcccgccgtttttgacttcgtcactcataacagtatcttcagtaactgtgtcagtctttttgcgattttgcatactgcttgcagccatctctgaggttatatttggtgaaataatgaaaatggggatgaaagtgggagggaagtcagaagggattgagaaaaaatgataattttttctacgtgagatgtgcaaacagcctgtgtctgtgttgctgaatttgctagcgtctacgtctgttgtccagtcatcctcacactagaaaagcaacaacgcgcctaccacgatcgaggagactaatatatagaaagattgtctgcattttataaattttgccacctcctcgttcatctctgacttactagaaaattagcttgctgttcaagcatatagcatgttttctatcctggtgtcaaaatgaataaagcatcatatcatccaagctcgctgtttggtcagaataaacactactttatgctctaagtatagacaaggggatgtgaaccagcagaggtaaaaaggataaaaaaagtggacaagtggtttgaacccagagccgtgagtgcgaaattctcgacagtgttctaaaccaggcagttgacctagagggtagtctagagcaggcgctgctcaatagacttactgactaggccactgggtgtccttgctcgtactatactgactttgatacttaaccaaccaacttatttgtctgcgaatacagaacagcccactattttatactacactctatggaaacatgagttatgaatccataagttttttaattgaagggcatatggttggaaatgttctggaccaattttgtctcgttcgataggcgtgtctctttgatacattatccaaccatacaccctcacattatatgaatcttagaagcattactggaatacaatagggtatactccgtataaagttctatattgggctataaacaaatagtcggagtggagttggagtggagtcaatggagtagctagcgtgaggtgttttcgttcacaaattccacgcatcgtcaatcttaacaacacaacctatgtgtgggttccatgataagcttgccgattactctgccaccggtatgaatgtgggaatcggtcttattcgaatggaacccttgggcagcagcggttatgaacccagagcccaaaagattccgaataaggacgcccaaggaggaaggctttggacctccttttatttttgcaccggagctagccttcactcctggccttaacgtattatgttgagagtcatccggtcgcaatgaagaatcattttgcagccgttgagaatgttatccataacatcttcatcatagtcacacctgaacctcggtgattaggattcaaggtcttgcgagatctcgatccgggcgcgactgcgatagcgaaagcggatgactgggcccgcatcatttgggttgtctgtcaggtaaagtaggctctgttacatgatcaggatggatatagtataatgtgggatggcgccaggaaacattggttggagagacggaggagatttcagatctgctgacattagcttttcaattctgaaagtatcgttatcacttcccaatgattttgaatcaaatccaggtagagcagacaagggctgtaattgagaacttcggggcaagaacagcacagagtccttggaaaggatggatttgggagacagagtcgtctttcatttgcgaggtgagaaatctgcagggcttggttttggcgaaataagacgtaattggtttgcaggaagttcagctgccatactgtgaagcgagtatgcaagtgaagagatggagatgagaaggaagcgaggcggcacgtagccttgtatatgcctcaccacacttctctcacttccctcacttccttctaacttccttttccttatcatatatggttccatgtaaaattatagcgatatgttagagtcaactactatatgcattagactaaagattcattctagaccacacgtctttctgtgaccgagaacgccaaggtcaaagtcaataggatgagtgacgcacattttgatactgaagtctatgttgttgacatacagtgaatgccttgacagaatacagaatgtcatgtcaaatatcatctaccctttttaaaggcgtaggaaaagcatagaactgttatcatataacaaaagtagggagagagaaaaaaaaggatcaaaaaagtggacgaacggtttgaacccagagccgtgagtgcgtaattctcgacagtgttctaaacctggcagttgacctagagggtagtctagagcagtactgctcgatagacttaccgactaggccactgggtgtccttactcctataatactgactttgatacttaaccaacaccgctcccttctgaagttctacttttggcaacttatttctctgttgtctccatgacgaattactgcctggcctgcttaaatctcctatctatcgtttatttcctcctatacaattctctgttgttgtttcatcgccgccaccctctttgacctcggggaatatcatatcttccaccagcagctctggctaacagaggaaacgggctcgtttcgattatattcggtggctcatacctctatatggtctccaatacgctcgagcgaggtttgatttccaatttaacataccgatctcttgctagtgttcagttatcggtactagttttacaatgcaggcgcttcataaccgccttgtgatcgacaatcggatccacgaacagcttttggagtctacatccttggccatttttgtcttcaaacgttaaggttttgatgatttgctcctcagcaacacagttattttccccagaagccaaaaggcaataatgcttttccgaacatatccagtttacacgccaatccgacgaacaatgcatcatatgtcagtgagggtggaagacaaagaatgcatgccaacctgaatacaagtgttattgtcgtaattctctatgaatcgcctattacaaccgttgtttctgaggaccttctgcccgagcataagatgctacccaaacatacgatcatcccaagaaatgataggcggcgactttaaggtgcttctgatggtagagttactccttattcagaattgtttctggatttgataattttctcccaggggttgcattcaaataccatgacatatctcctagtaccatggctttccatatctcgtatagcctcaatttatacgtttaaatccaaactcatattttttgacaaggacagtctaccaatcctctctgtccaaatgctggttatctttggtgactcttggctcttcgaggtggccttgtgataagtctattttcacacgtataaagccctcataggagatacagcacccaatcccaatggaaaacttatactttggacttttataaagtttagacaaaagatactcgtacttgaagcgatagctggaagatatccgcgtgagacagacttcgtcagttgctacaaacaggtttattgggaaggggagagacctccccagtcaaacagagaatgggcgcagtcaacgaggaaggtgctcagctcttcaaactccccgcgcgtaaaacatttctcttcctctcctcttctcttttcgcatctcatcccatccacctttcaaaacagccataaccatcacaatggaagaccctctttcccggggggaaaccccaaagaataagaaaaagcggaacccaagcttccgccgatatctacgagaccatggaattgatgtcgtaagtacttatatctactctggtctcaacccgtcgaggtcttctgcttgtcccatcatagctacgcatcgtatgatctgaattaacattttggttgaattagccttcgcttgtgcagggagtacgtgaccctgcgcttcccctaaagcgcaagcgtaatcatcgccgctataggcaaaagaaggcgaagaagataggtatgttttatggtatatatgatactgggtagacgctaatgatctaaagagacagaagctgccgcggctacccaaaagaatgaggtagctgaatctgccgactcttcggctatcgcgaagagaagtttctgcctcatctcgccagttacagcgccctcgcctgccgctccctcacatgccacgccctcgccttccaagccctcgccctcgcctgctgtcacttcgcctgaaaatgtgacattgcccatccgagggcttcgaaatccctataactaactaactggttagttaattctagtctccaagaatgaagcttttcacccataaaaatgcagacatgtccatatttctaggtggtttccaagacagatgaagctattcagagatcacctaatctacaatagattgctaccatatgcttcatgtttgcttgctcgcttactgtttgcatgtctattagtttgcatcacatagattgtttgctagatagctaagcaaaacgttcgaggttaccaacttttgcaaagggtcagcgatatcaactggctgcttccaatttgcaacttgcctcttctttctttctccatcctagttattttgtattagatgcgctcctctctctttgcaagacctggcacataaaaggagtattgtaaatctaacacccccacagaatgaaaagcaatagtggctgtaaagaggagcaaccagattatcaagatcagtgagtcttgagaccgtgtgttctttgttctttactaggcagtatatcctaatcatgtaagcaatatactttaaaccatatagggtacatatggcaagatatgttctgtttttttgttacagagtgatcaggagaagcataacgcatcgtctgagcaggtaggtgaggtacatggtgaaaggcgagaatggtgattggatggagtatgaaaaaccaataagaatccgtctataatactgactttgatacttaaccaacaccgctcccttctgaagttctacttttggcaacttatttctctgttgtctccatgacgaattactgcctggcctgcttaaatctcctatctatcgtttatttcctcctatacaattctctgttgttgtttcatcgccgccaccctctttgacctcggggaatatcatatcttccaccagcagctctggctaacagaggaaacgggctcgtttcgattatattcggtggctcatacctctatatggtctccaatacgctcgagcgaggtttgatttccaatttaacataccgatctcttgctagtgttcagttatcggtactagttttacaatgcaggcgcttcataaccgccttgtgatcgacaatcggatccacgaacagcttttggagtctacatccttggccatttttgtcttcaaacgttaaggttttgatgatttgctcctcagcaacacagttattttccccagaagccaaaaggcaataatgcttttccgaacatatccagtttacacgccaatccgacgaacaatgcatcatatgtcagtgagggtggaagacaaagaatgcatgccaacctgaatacaagtgttattgtcgtaattctctatgaatcgcctattacaaccgttgtttctgaggaccttctgcccgagcataagatgctacccaaacatacgatcatcccaagaaatgataggcggcgactttaaggtgcttctgatggtagagttactccttattcagaattgtttctggatttgataattttctcccaggggttgcattcaaataccatgacatatctcctagtaccatggctttccatatctcgtatagcctcaatttatacgtttaaatccaaactcatattttttgacaaggacagtctaccaatcctctctgtccaaatgctggttatctttggtgactcttggctcttcgaggtggccttgtgataagtctattttcacacgtataaagccctcataggagatacagcacccaatcccaatggaaaacttatactttggacttttataaagtttagacaaaagatactcgtacttgaagcgatagctggaagatatccgcgtgagacagacttcgtcagttgctacaaacaggtttattgggaaggggagagacctccccagtcaaacagagaatgggcgcagtcaacgaggaaggtgctcagctcttcaaactccccgcgcgtaaaacatttctcttcctctcctcttctcttttcgcatctcatcccatccacctttcaaaacagccataaccatcacaatggaagaccctctttcccggggggaaaccccaaagaataagaaaaagcggaacccaagcttccgccgatatctacgagaccatggaattgatgtcgtaagtacttatatctactctggtctcaacccgtcgaggtcttctgcttgtcccatcatagctacgcatcgtatgatctgaattaacattttggttgaattagccttcgcttgtgcagggagtacgtgaccctgcgcttcccctaaagcgcaagcgtaatcatcgccgctataggcaaaagaaggcgaagaagataggtatgttttatggtatatatgatactgggtagacgctaatgatctaaagagacagaagctgccgcggctacccaaaagaatgaggtagctgaatctgccgactcttcggctatcgcgaagagaagtttctgcctcatctcgccagttacagcgccctcgcctgccgctccctcacatgccacgccctcgccttccaagccctcgccctcgcctgctgtcacttcgcctgaaaatgtgacattgcccatccgagggcttcgaaatccctataactaactaactggttagttaattctagtctccaagaatgaagcttttcacccataaaaatgcagacatgtccatatttctaggtggtttccaagacagatgaagctattcagagatcacctaatctacaatagattgctaccatatgcttcatgtttgcttgctcgcttactgtttgcatgtctattagtttgcatcacatagattgtttgctagatagctaagcaaaacgttcgaggttaccaacttttgcaaagggtcagcgatatcaactggctgcttccaatttgcaacttgcctcttctttctttctccatcctagttattttgtattagatgcgctcctctctctttgcaagacctggcacataaaaggagtattgtaaatctaacacccccacagaatgaaaagcaatagtggctgtaaagaggagcaaccagattatcaagatcagtgagtcttgagaccgtgtgttctttgttctttactaggcagtatatcctaatcatgtaagcaatatactttaaaccatatagggtacatatggcaagatatgttctgtttttttgttacagagtgatcaggagaagcataacgcatcgtctgagcaggtaggtgaggtacatggtgaaaggcgagaatggtgattggatggagtatgaaaaaccaataagaatccgttggttaagtatcaaagtcagtgtggtaggagtaaggacacccagtggcctagtcggtaagtctatcgagcagtaccgctctagactaccctctaggtcaactgcctggtttagaacactgtcgagaatttcgcactcacggctctgggttcaaaccacttgtccactttttttatcctttttcttctctctccctatattaggaccatatagaggtatgagccaccgaatataatcgaaacgagcccgtttcctctgttagccagagctgctggtggaagatatgatattccccgaggtcaaagagggtggcggcgatgaaacaacaacagagaattgtataggaggaaataaacgatagataggagatttaagcaggccaggcagtaattcgtcatggagacaacagagaaataagttgccaaaagtagaacttcagaagggagcggtgttggttaagtatcaaagtcagtattataggagtaaggacacccagtggcctagtcggtaagtctatcgagcagtactgctctagactaccctctaggtcaactgccaggtttagaacactgtcgagaattacgcactcacggctctgggttcaaaccgttcgtccacttttttaatcctttttttttttctctccctgtagtagtctctacggtataaaacaacaatatggtagtcttttaatagacactggcttggtattgctcttccccacggacaataaccatttattgatgtgacgcgctaacatttctattaagggggatagaagagaaccataacataaagctgtgatacgacgcgaaatggtttgtttagatagatccttgcctaagggatagctatataaacaggaagcttcccaattttcaacttgcttcttctttctcttcatctaagttattctgtattgtgtgcacacttctcttgcaagacctgccacgtcacactaatctgtatatacagactctcctaccgcggcatgctcgctctcgccctcaccctcgcgtactattttgccttcctttagatgcacggccgctaagtctccctcacctagtgcccgtgaccatgtgggccaaagaggaggctagcccatcttctcagagtatgcaagaggagacagaggctgatgattttgtgtgggatgccgtggaccctctgggtctccttgaataactggagaaactccctggattgatatcagcagggcttctcgattgggagatgggttgttgggggcctagaggggccatacctcattcttgacatttgtttgggatagagttatgaggctccatcggaaatctggtccgtgcgtacgaaggtgtatagtggccaacagtcggatgcctgattttaatggttttatcgcctaattgggactagctcttaccagttttagaccgcctttgacaccgctcaataccatcttttgtaagtacacatcgaagagacgaaactgttaccatggggtaattcaaatgccttctacctattttaattctcaaaactacattcaaatattcgccacgccggagccagaggatacggagagtttgaagtttatacggtcggtaggaatggggactttgtgttgaaatccaggcttggctttccaaccgttttgggccttggtgtcagttgcgctattagcttttctccgggaaagtgcgggactacggcgggtatgaatggctttaaatacaggagattcatatagttggagggccttaacgcctaggatcgatgagaaatagtattttggggggggggggggggggtatgcaaactttctttttccaatttttaaccnnnnnnnnnnnnnnnnnnnnnnnnnnnnnnnnnnnnnnnnnnnnnnnnnnnnnnnnnnnnnnnnnnnnnnnnnnnnnnnnnnnnnnnnnnnnnnnnnnnnnnnnnnnnnnnnnnnnnnnnnnnnnnnnnnnnnnnnnnnnnnnnnnnnnnnnnnnnnnnnnnnnnnnnnnnnnnnnnnnnnnnnnnnnnnnnnnnnnnnnnnnnnnnnnnnnnnnnnnnnnnnnnnnnnnnnnnnnnnnnnnnnnnnnnnnnnnnnnnnnnnnnnnnnnnnnnnnnnnnnnnnnnnnnnnnnnnnnnnnnnnnnnnnnnnnnnnnnnnnnnnnnnnnnnnnnnnnnnnnnnnnnnnnnnnnnnnnnnnnnnnnnnnnnnnnnnnnnnnnnnnnnnnnnnnnnnnnnnnnnnnnnnnnnnnnnnnnnnnnnnnnnnnnnnnnnnnnnnnnnnnnnnnnnnnnnnnnnnnnnnnnnnnnnnnnnnnnnnnnnnnnnnnnnnnnnnnnnnnnnnnnnnnnnnnnnnnnnnnnnnnnnnnnnnnnnnnnnnnnnnnnnnnnnnnnnnnnnnnnnnnnnnnnnnnnnnnnnnnnnnnnnnnnnnnnnnnnnnnnnnnnnnnnnnnnnnnnnnnnnnnnnnnnnnnnnnnnnnnnnnnnnnnnnnnnnnnnnnnnnnnnnnnnnnnnnnnnnnnnnnnnnnnagatgggggggggggggggggggggggggggggggggtatgaatagcttcatgtttcaactttcaagctgttctcaatttggtactaggagatctgtcatagtaattcaggtattttaatttcctgccggtctaaaattggtaagagctagtcctaattaggctataaaaccattaaaatcaggcatccggctgttggccgctatacaccttcgtacgtgcgtttttttgataaatgcaatttcaacgtcttcctttaccattttcattgagtttttggtctttacttaatcgtaattaaaaaagcagagctacgagctataggtagagactatggaagagatctatcaaatatcttgtttgaaagctcgagatattggcagtattcgttactatgaccgattatcacgtgattgagattggttaagtaccaaagtcagtgtatagtattcatgcgaaacccagtggcctagttggtaactcgaccatgagccatacctgctctagaaggaaatatggtaatcgtccataaaaacattgtaaaataatatgaagaagtctacgggggatagaaccttggtggtgcccttataataaatttatcaacgatcaagaaaaatagatctaatgctataatagcttctaatttaaccttatgtattctgttatgttctgagcaggccatatcttgcgcatgaaaagagcacgaagctcacccgctcatttcatgacgtgacagaagttttgatcttggtctttttctaatcatggtgtgatgaacttgaaaacatccatgaggctttgtaccgaccttgaagttcaccaaaacccactgaaaccccctggatatcagaactgggccaagtgagcaaaacttggacgagttcgaaagaccaggataagtaaaggaactcaaaccctcttgaagtattggagcattaaacccagatcctgtacgatgttatcagaccgtatccaagttgagatgtgatatgcccggaggtaactctagtcagtaagtgacagcgaagataattctgagcccaagtgtgcaagtggcgcatggagacatcctagctgtgtcatgacctgaagaccccagttttcagtatttcttccgccaccatcgtttcaaagggcctcgcttctagcccacgagagtgagagcttgttggcgaatctcgcagatgtatgggctcacaaagcgacggacgatgcgtgatagagtacagctctagaaaacatcaattagagtcactgtcttcgagaaatcaatgacacttatcatgtagtaattcttcgattcttctgatgataaaatggcagcatgtgttgtagaatattccaatattgcgtctcatcttacaatggagttggcctcgagaatgcccaactgatagtcagcatatgaggatccagcccggttctagatgaaacttggttgacgactgatgaatttagaagtggaataattgtgggagagaagagaaagagaaaaggcgcaaatggagacagcaagcatgagcaaacgagcgagactgggttttgtgcccactacgccgacattttttgtacgctctaatctttttctctttgtttacgacccaagaaaacagatttacacgcattgcaggaagttattgcaggcacaagcttcagggcaaactatcatattcatgttggccttatgttgacatggtcttcgtccaccgacttgacctcggtatagacgagagtgtgagctcagtcacaaccaataaatctcatggtatgttaattgattgaccatgagagcagaacacttccaagtctaagctgaaacccggtgttgcgggggttgaagtaaatcggggactatcgcgggaccgcggacttttgtccgcccaactccacttcttatcaatgaccatacaaagtactccagaccttccagctttcctttataaagcgatagtacgcatggcgcattctctgtttttacgaaatcccccaagaaagtatcttcaacttgtgaagcctctcattttgaaccctgctcgaacactttcttcatcacgtatacaagctatgttgacaacagagctctctgagactcaggtctctgcgctcagggctaacaaggagcgcctggccaatgatcttcatcattcgtgtcaatggggatctgggatcaggtggggagagtaagatacaaccatattttccaaggcgactggagaataaccgctaacaaaagcctcggcgacttgatagtggacctacagataccggcatgcagcgcctggcgatttcagaagatgacaagcacgtccgtgattggttcatccggactatgaaagatctcaagtgcaacgtcaccgtggacgagatgggtaatatctttgctgttcgtcctggtcggagagcggatgtacctgccacctttattgggagccatctcgatacacaaccgaccggtgggcggtacgatggtattctgggtgtgttgtcaggtatcgaagtcatcaagactatgaatgacatgggtctggaaacggaaggcggagtcggggttgtcgactggaccaagtaagatcccacgttcaacctggacaatgatcatcactgaccgtgtccagcgaggagggcgcccgattcccgatcagcatgatctcgagtggtgtatgggccgagtgcatcccattggcgcaagcacataatctcaaagaagtcccaactgtggcatcgctgccaacagcggcatcagcaccagagactatgaagagcgccttgcagaagattggttacttgggtgatgtcccatgctcgtacaagtcgaccccgatggccgcccatttcgaagtgcacattgagcaaggcccatacttggtgtcggcaaaccagcgggtcggagttgtgacagctgtgcaggcctacaaatggttccgtctcaacgtcatcgggcgagatacacacacaggaaccactgcctttgaacatcgagcagacgctctctatgcattcgcccagatgatggtgcgcgcacgggaagtggcagcttcgaagggttgtctagccagtgtcggcattgtcgaagcgaagcccggcagtgtgaacacagttcctggagaggtgagctttagcttggatatccgtgggcctgagacagagctagttgccgaagtcgagaaggagctgcgcgctgatttcgacgctattgccgccgctgagggtgctggtattggtaaaccttgtcgcgttgagtggactctagacttcgactcacctgcaatcaagttccatgaagactgcattaagtgtgtggagcagtcagctcaggctgttgtcgcagatgcttctgttgcggatacaaagtcacttgtgcggaccattatgagtggtgctggccatgacagtgtcttcacttccaagcgtgtcccaacgagcatgatttttattccatgcaaggatggtcttagtcatcaccccgaggagttctctactgccgatgattgcgctactggagcatctgtcattttgcaggctgtagtgcgttatgaccggaagagattcttgtaaggcggatgctcactttaaccgaacagaaacgccttgtatatagttcagaacgtttaaatacgtcaggtatattaatgcatattacaccgagattagcttcgaaattatctactccgtcgttgctcaatcagtgtgacgtacatagagtgaatgcgttctccaggaatgcaatagatcgactagtcaagagagctcgaagacctacactaagttcactaatagaccattgtcactcatgtcataaatttagcaatgagtgactatgacaatctacatcaatccacatggatctacataatgaaaccagtggaaacatgaatttcttctttttattttgtttcctgtatccccaagtcccagtgaagctggaccgagatctaggtgcaccgagtgtaaggcccatttcgagaaacctctagtccggcagccgaattcgggtacaccatcaagactctagattgaccgagaagtggttgacaggacaccaatgcctctcagcatttactcctggggagcagcaccacggccacggccgaagccaccgcggaaagagggagcgaactcgccgggggcaccgccctcctttccaccctcctcgcgacggcggtaaccgccctcacggggagcacggggaccacgacgctcaccgcgctgctcctcaccgcccatcatgccgcgggggggagcgtgggaacgctgctgcttgatgtgggtggcggggacaacctcggcggggaggtggagccactcacggaggtagtccagaccctgttatttgattagtatttggacatgtgagcgtgttagatgtagacgagtcgtacctcgggggtgagggtgtagtagtagtactgccacgagaactgagtcttgacaaagccgcgggagtccagggactggagggccttgatgacatagaggttcttggtgtcaatgtcaccgtgcttgggaaggttgaagtccttcttggccacgagcactccctctataatttgggttagtgaatccgcacatgacgcgagcgcaatgtcgcagtgtcgcgggaacgtcgacgaaggttctcgttacataccacggaagaggtactcgtggatcttcttgcggtcgtccttggggataagcctgcgccattgttagtaaatgtgtcgggaataatcgtaagagcgaggatacgtacattgtcgcgagttcctgttgcaagtcggggaatcgctttgacaacgcccgaaaataatggttgatttaaatgatggatgaagagtggagcttcgctatgagaaaagtgcgtcggtccgaattgggtgtagggttatgaccctaatcagcttgtggttcaggtcacatgatacaaccttggaggtgatacaccatcacgtgagaggaaccataatcgctgactaagaatatgattagtcatcctggctgcggccatctcgatcttatcggaacatcgtccatcttctaatacaactatactttcttcctaccaaactcttcagttgcacgctcctactagtatatcgtgaactgtttctgacacacaatatggcttcctcaactgtcaacgttctgttgtcgtcctttccgggactgtcgctgccggcgacactttcgttcattttgccatcgacagcgagcacatcagacctggccgccaagatcgcttcatatctcccctcatcactctctcttcagtctctcgtccttactacaacaaataacaaacatctcacggccacctccgagtgtatccaatcttttctcccgacccgtgatggcgtctttacctccacactccttccgctacgcctgactgcccccatccgcggtggcaaaggtggtttcggctctcaactgcgtgctgccggtggccgcatgtccagcaagcgacagcgcaatcaaggcgataacaatggctccagtcgcaatctcgatggccgccggttgcgcactgtcaacgaggcaaaggcactagcggaatatctcgctgtcaagccagaaatggacaagaaagagaaagaggagcgtcaacgccgatggcagtccgtagtggagatggccgaaaagcgtcaagacgagttgaagaacggcagcggcaggcagaagttggatggacagtggatggaagatagggaggaaatgagtgaaaagactcgggaagcagttctacgggctgtcaaggatggccaatggacggataatcttcgcgacgcactcctgggtggatccagcaccagcgccagctccgagggcagtgaggaggatgcctcgtccagcgaggacgaagagagcgaggaaaatggagaatcatccaattctgttgctaggccgtctatgcctcaaaaggccgcaccaaggaagttcattggtttcgatgaggatgacgagttcatgagtgactccgatgacgagatggaggaatccggcaagggaaagggaaaggcgcgcgcttgatcttctagcaaaccaatatttgtccatgtttcacgacagcgttcttttactgctactttcagggattctccagcgcatctgtgtttcagcgccttctgtgccaataatttcagtctccgataggagttttcaatccaaattcatttactgccaccaattttagtctcactttagtatactaatccgtaaaatgacttgttgcgcgttgttgtacggcggcccgaatttaccatgtgcgctatcgatagataactgtctccaaagaaaaaagctccgcagctactccgcagtttcgcacgccatcatgtcactctgctctcgaggcgcagtgttcagaaacccgagattcagtctgctgtgtctgctcccaaagagcattcctcgatctcaggctcaaattcccttctcaaaatcgcgcgccgcgccacaatccaaaggccttgcggacctccgcaggcaatgccgatgcttttcaacaactcgccttcaacgagaacagcccctggctgagcctcaagctggcactctagccgattccctgccgttgtgctgcccaggatgtggcgcattctcccaaacagttgaggcaaacgagccaggatactatggtacatctcgaaagcagattcggaagctactcgccgtgagaaaggaagcaattgaatacagaaataaacaacaaaatgaggttatatctaccgagggaggtagcttaagcgcacagcagagcgatgccatcgaggatgcagtgccacccaagcctattcaaggtaggacatctagacaattgcgtaaggttgccattttgctgactgaagaaaaagatggagcttttccggatgaagctgtcgatcccgagaataattttcttgggtctccgggtcgaattaccgaagtctgtgatcgttgccacgacttgatacaccacaacaaggcagtctcttcgcccaagccgactattttgtctatacgaaactacctcgaagaatcaccgtatcgacacaaccgtgtctaccatatcatcgatgctgcagatttcccaatgtctctcgttccacggattcattgggctttaatgctgcaggagcaacgttcgcggaaccgacgatctacgaacgagaaatttgaacgcggaagaagacttccatcactctcgtttataattacgcgctcggatcttttggcggcaacgaaagagcaggtagactcgaagatggattatattcgcacagagctccgcgcagctttgggaagatcggggaaggaggcccgtttaggcaacgtgcacatgattagcgcgcatcgtgggtggtggactaaggaggtcaaggaagagattcgagagcatggtggcggcatttgggtcgttggtaaggcaaacgtgggaaagagcagcttcatcgaagcgtgtttccccaaggattctaggaatgtggagaaaattgaagagtgggttcaacgccgtgaggaaaatgagattcccaccttccttaaccccgacagccttctgccccccgccccccgcgaggatctctatcctgtgctcccagtcgtgtcttctcttccaggcactacagtctcgcctatccgcattccattcggtcgtggaaagggcgaggtcatcgatttgcccggcctagagcgtggtctgttggaggactttgttcgggatgaatacaaacgtgatttgatcatgacgaagcggatcaagcctgaacgttcgaccattaaacccggccagtctcttttgcttggtggtggtcttatccgcattaccgctgtgaaccctcaagatactgtcatgtcggccagtttcctgcctctcgagtctcatatcaccaacacacagaaagcaattgatacgcaggccgaagaaatcccctaccgagggactgtcattatgaaagaaggaaccggcagcacaattgcctcggccggtatattcgacttgaagtgggataccaccacctcgaatcttcccacctcgctagccaaagctgtaaaggacagggggatccctgtgccttcattgccgtatcgtgtgatgtcggcagatattctcatcgagggctgcggctggatcgagctcagtatacaaatccgcagcaagcgggacactgaagacgaaccttcctatccgcaggtcgaggttttcactcccaacgggaaacatattgggtgccgacgtccgattgaatgttggaacttcattgcagagaagaagaaaatcgacaagcgcaaacagccgcggacgagatattgatttttgttgtgatttgggtatattatatggacgtgtacattaggccatttagcatagcgggtcggcgtttctcctctccgtccttaaagtggtcagctatatcaattggctgcttccactttgcaacttgcttcttctttctttctccatcttacactccttcttccatcaagatcgctctggcgccttacaagatggaaaacattttcgatcttgtttttcttctagacacagacattccatttctgaaatcaggtaaattgcactccagaatcctcatatcactttgctcgttgtcctaacttcgaatatcgcttctagattcctgtcacaatgatcgaaaagggttatcggtaaaaaggccgcaaggtctaatctcccccctctcccaataggggctcagttatcgacaaatgcctgccaagtttcagatcaagatcacttatgcatttgagaccaatgcgtcagccggcatatttgtccgaatgacaacccaaggccgaagtttaggctagagcattatctacatactggggatgtaggggatgttgttgagtcttatatccgggcggggagatacagaccgcatgaatggttcatgcttgaagaccttggggatgaccaagaacgttctaagttgacaaatatcaattatcacatggaactaaccagttaacgattcatagcccgcagaatggttctttccaaaggtcctcattttgtacgtagggctcgtaggtgggggatcaacctttcgccttccgacaacatacgacgactcgcttatttattctgacaagattcttttataattgctagatttgttcctgtgcaattaactcgtctcaatatatatatcactccctaacgttcagcaaatcagcattcacgctcgtctatcccatgatgttatcttttcggggaagcgaaaatgccagggaactggccaagccctggcgctttagtctaactcagacctatgacccaatggagaacccgacagggctcatctcatttggcctggcggagaatgtatctacaacatatatcctcacggccggaaaccaagagctaacttccaaccagagaccaatgagagcggagatagccagatatatcaaccaaaatgtgcgtattccaattttcacttcatgcccacatagtgtccactgactgaaagaatcccgctaaatcacataggtcgtttttacacaagattctatcagctaccgcccaagcgcaccgacagctgcaagattaccagctgctgctgcagttcacctgaacaatatcctcaaaccacatgccccaattgatcccgaggacatattagtggcagactgtccgacttctcttggcagcatgctaggacacagtctcgcagaatccggggatgggatcctcgtcagcagacccatatatggccgctttgagctcgactacggcgttgaatctggcgttaaaatggtttatgctgatacaactgtggaagaggcattctctcctgcttgtgtggaaaaatatgaactggcttttaaggaatcctccaagaacattcgagctgttctgctcgtcaatccacataaccctgtcggtgagttatacatgccgcttggtccgttgattgaactgatttggtacggccaggtcgttgttacccagtcgagacactcaaggctatcacccgattctgtaataagcataacctccatctcatcagtgatgaggtatacgcttcatgcgtgtttaattctggtgaccctgaggctgtgccatttacgtcaatcctctcgctggatcttgcgggattgatagatcctaacctggtccatgtgttatatggtttcagcaaggtaggcatcggaaaatctcaatagaggcaaccaatttgacatgatataattataggacttcgcttctggaggcctccaccttgggttcttggtgaccaaaaatcggcagcttcggcaagcctgcagaacaatcctgtgagatctcgaccgagcaccacgaaaactaaaaaacgtcaaagattaactctatataggagactgcacggcgcttcacaagcagcggtgactatcggcaccgtgattctagaagaccaagctttcgtggcaagcttcacagccaaagcaagacagagcctcgcttcagcctaccggtttacaacctcagtgctcaacagggagggaatcaactatgtcaagggcgggtgagtataccaaactcggagaagacattattcaaatcctcatctaatccggttatcagaaacgctggcttcttcgtctacatcgacctgtcaccatatctgccccgtgacgattatcttaccccgcgaaaccgggagttttctcttgctgagaggctcgtcgatgctggtgtgttcttacatcccggggaagagcattcgagggatattgggtggttccgcctggtgttctcacaggaagaggagatattgcaggaaggctttaacaggtgagtcatttgctgattatttctatgtattggttcggcccgttgattgatggtttgttttgtgatttatagattgttgagtgttttaaggtcaagtaaatgaaatattctcgatgtcaccatcaagacttgaagatacggggaaagtatggcataaaaacgaaggacaatgcaatcagaggtagtgaatgcttagatgcaaaggaatagaactgaaatattgaaaatgctatatgctatatgttttatttgattttggcagaagtcatcaagcatgattttttgaaactggaaaatgagattgtatttttcaaagcaatgtcgtttattcgacgttgacaaattggaatgtaggagttcctggcacggcattctcaccggccaagccctcacgcttctcaccagtaccaacaacctcaccagtcttgccaccctcatcaacagcaatgatctcaatctccttgaaaccagaggtgcgcttcagaccacccaccatctcggaaagaacgacgaactcatcgaagggaagcttgcgatcgaagacagtggcaggggactcgccagcgttgaccagacggcgcttcaggttctgaacaaagggcatggccttcttcatctcaccgaacttgccaacctttgcgctgagctccttgtcgttgaaggagaggttcagcgcgtcgaaagaatcgcggaccaggtcaatgtacttctcctgccagttggggaacttcttggcaacgaagatgataagcttcttgggcttgcgggggtcgaaggcaatgttcttgcccttggagagcttcttggtgaagttaccctcggagctcatgatgttgcttgcggtaccacggacgtagttctgagcggcggtcagctcgggagagggctctggcacagaagggaactgggcgaagtgaatagactcgggctaaaaggtgttagatcaaggttgagcataaagtggggtaaggaaactgaccttattgaggacctcgagccagatgtgctcagcccagtgaggagtaatgggtgccagcatcagagcctgcagctcaatgtagcgcataatggtatcacggtgcatacccacgccagcagcagtggaagcctcacggtagctgtcacgggagctagtgaagtcatatagaccggacttgagagcaagcttgaaatcggtgctagattaaagggttagttattgatgtcaatgaattaatggaatgcgaagcaagagtgcaaagcagtgaagtccacttactcctggtagtgcttttgggtctcgcgaaccaggctgttaagttcgttattgaaaagcttgtcagcgaaagcatcagcaggtccagtgcgcagagtctcgtccttagcaatctcctcgatccactccttcaaggtgtggagacgcaggatgttgctgttggcaacagactcctcaaagttggcatcttcaatgctgtcaccagcatcggcaaatgcaatacgggtagcatcggcaccgaacttgtcaacggcatccttgagagtcaggaagttaccggtactcttactcattttctcgccgttgaggagcaagtggccgttagcacggacaccacgaggccagtattccttggggaagagagcaatatggatgtagaggaagaaggtcaagtggttctggatcaggtcctttccggagacacggacatccagagggtaccagtattcgaattcacggcgcattttctgcagagattccttgctgattccactcttagagatgagttcgtcgctaatttcccttcttgtgaaaacgtagtcccagacctcatcggtcatctgttcggcggtcacgttcagggagccggtcgtcttgccgtaccggtcaccgtgaaggaggtgggcgatggtgtagtaggccatatagacggtactgtcactcagactctcaactaggaactgcttgtcccatggcagcctggatccaagaccataggttctggcacatgcccagcggttcagccaggaaagattcttctcgaacccgtttttgcattcggcggagtaggtgttgaggttgttgacaacgtagttcagggtctcctgctgccactcggcatcattctcaccgtagttcaggaaccactggcccaggtaggcaacaacacagtcgtcaccactacggctgacaaccttgcccattgggtcggcgaaagggaaggcatcaccactgtcgtagaggtccttgcggaccttgtccttagcctcactgacaggctcgcccttatatttaccaactagcatagtacccttgtagaaaccttccatgtaggccaagtccttggcctgagcaagctgggtgacgtccttgggagagttgatcttcagctccttgaccagagcaggagcagtcaagctgccgtaggtgggagtgtcaatgagcgggaatatttccagctcagcccactccttctggatgccgtaatactcagccttcttcgccaaatccaccagggtggcgtaatcgtcagggctgtcggagggaacagaggtaacaacaccagtacccttggctgccgaaacactttccatgggcaggatgcgaataccctcggtgtggaaagacagaggtgcattgaccagtgttccgacgaaggcggaacccggcacctcgagaaccagcgggagctcatcttgggtcttggggaacttatcgccgaagaaatgaccctggaaggccatgttccaagcagctcgcttggtaacaacaatgtattccttctccttgagcttgaaaagaccgtagttgatcttgggaccgacgaagcagctagtctgaccgtacatggtctccggacgcagggtagcaggaacgaagtataccttcgcgtcatcctcgatctttcctttcacgagctctgcaattttaggcgaccactccttgacctggagcttgatcgcggagtattcctgaggaccgatgccctcaccctcagtgcggtcgtggtccatgcaaggctgaccgtccttaggcgagtagatggtgtaacggttgccgtacatgatcttaccgagctcgtgcaggcggttcatctgccaacgcacgaaagcatcgtagtaggggttagcatcggtggtgacgaactgtcggcgccaatcgatgcgggcaccgatactgtcgagatcacggatggcaagaggagggaagtgttcgagccagtgggcagcgtcggcaaacttgtgaatttcctttagaggaacgccaattgccagcatgatctggaactgatacttcatcttcacggtcttggcagcggccttgctcttcttgccagagaacttctcacctgcctcagtcttaacttcttgtgtgggggctgcgaggaggtcctcggcggcctctgcctcctcattgtatccttcgaaaccctggccgaacttcttcacctcgttggcaagcttatcggcacaagccttgataggcataccggtgcagtggaagcccagagggaaaagggctcgcttgccctccatgcgggcaaatccagccatgaactcgaccttactagcagtaaagctgtgtccggcgtgcagagtaccgttcatgtaagggtaggccatggtaccgaagaacttggggtacttctcacggagctcggcgggggtcatggcaccctggggggattcctcgaatgagggcgcatcgacttcgaaaatcttgttctccttccattgtgcttggtacttcttttctattgcgactagggtgtctcgcttttcggtctggcaggcgagatgatagttagtaaataaaaatcggggatggtggggagggaggggtatagccacattttccaatttgagggtgttctttgagctgttgctcggatcgagctcagctgcggatgcaactgcggcggccatttttcctgattgtcagaattggcctataattcccttggagagcggaggggagcaaaagaagcgcgaggcgagatataaaactgtttgctcggtttgttcagtttgtgagtcagtgtaatacgagtgtactgtattttacggcggattccacactccagatgtcgtttagaatgctgcattggtgtgtaaaagaggtgataagtaagagatctgaggtaatatatgtatataaatctagtcaaaagatgaattctcattctccttttgtctctaaagtgagtttcaactaaacgtcttctatgtgaccggatcaataccatctatagattggaggtgcacgtgactatcacggagcaacttcttcgccgacaagcgcatctgcgataaatttccccgatcaacaaactcgcaattccggacctatattacctgttattgagcaattatcttgccaattagtcttctacttttgccttatccctatacccgcacgtctcatcgcataagggccagtccctgtgcggaacagccttcatcatggtcaacttgttcaagcggcttcgtaggctgcaaactgtatgtatagcttctctcagctctccctacccgagcttctcaatgtaacgcagaattgatatactaatgtaaaattgtttctgtcaacagagagtaagcccgaaaccccgttcttcgagatctccgaccctgcaacctccgaggccgaactcgtgtctcccacagtctggccgatatgcaatcaatcaactgactcgttctttcactgttgcagatgctcgaaaccaaagttggcacaggtgcagccatctttcccagcctcacctccgcatcaaaagaattcccagccgtcacccgactccacctcacatatgcacgcaagatcgaccagggccacggaggcgcgcggcatttctggcgtaactgtcttccgcgactgaaatatcacaacccaggcgtgccgatgactgtggcacaaacctccaaccagcaaggacccgcagcattgacaatttacttcgccgaacgggtcggcagcgccgcagcggctctcgcaaacgaaagaaaggtcgtcgatgagcttgctccgacccccgaggccaatgagcaatcagctgttctggatatcaagaaccgcacgtaccaacaaatctgggatcgtgtccaggccatgacgggcgcgaaggtagtccccgccaccagcgaagacatcgcgctggcacagaagttggcggagatcaaaaagaaatcgggcccggatcgcgaacgtgtccaggctatccggcaggcgaagaaggatcaggagcgcatgctcgctgaggctagaggccaggtggataagcaagtgtaagatagtgcagttttgttctagtgttgtctttggattcggttgatccatccaactggtttcttcgtcttgagaaatcggctgtctgtagcatagcatctttttcccgttacgactatgtactatttcttggaatatctttttaatgcgcatgtcgcattcccttgttactcaaattgcgtgaacactgaagtagatggaggcgcataggcatcaaatagcaatagcaataattgtagattcaacatctcgcaatatcaacgctaaagtatgaaagacggcctaaaacagatgagaaagacatcaccccatgcaaaactatgaaatgtccgaacaacgacttacagaagagaatgcattcgcgagaagtgttacatgacctagaacattgttagcaagaagaatcattacctggtaccaagtcaaatacatacttcagcgattgactgccgctcaatgattgatttctgtctctcgttgcgcgaaacacggtagtaatagtcggtaaagtcaccacatttcatgtggcgcaggaattcttcatcgtgcgtgatgacaatcaactggaaattagcctgctgttgacgagtgcggataatgtcatgcagcgactccgccagagagcgaatattatctcggtccaggttcgtagtgggctcatcaagagcgatgagaccgcaattgacaccgaaacattccgcaagggcgagacgaatgatgatactagctaggaccttttggcctgcactgcatcgacctcgcatgtccatctcggcgcctgacttgaccatacagacgcggtagttgtatgatcgattgcccttggcgttctcgttatcagaccggatgaggattgtgtcgacatctgttccgcgatatgttttctgccacagttcgccagcgatagcgttgatttccgccatcttcaggccgtggtattgcatgattgctttgtcaagagcgccaccgtatcgagccaggtcttccacggcggctttggtggtctccactttgatgtgggattccttgtattttgaggatgcatccttataatctgtgttccagtccgctagcagctgcatcaactgatcgtccttggacttcatttcgcccatcttgctcgcctgtttggcagcaagggcattgtgttcacgagtccagcgttctgactcttgcttgaaacggcctcggtccacttcagcattttgggcttccaagtgctcaacttcttcagcaactgtgttgagagatcgagtggcttggcgatatgtcaagttgtcagagtattgccgcttggtgttttcgctgtccttgagttgggtcgagattttgttaatctcccttgtgatctcgctttgatcggcttcgagtttgccaatttcagcttcgatttcttgaagctcctgcttgcatcgttcaagttggcccagacctccccgttgattgtacgagttgatgtcatcattggcaaggtcaagctgattgatgttctcagataagcggctgatctcgtgctgcagatctcgttcacgctcgtcggctcgctggctgatatcatcgtaacgggcttgggcttgaagcaactctggcgtgagactttcgatatctcgatctgccttctcaattgcgtcccgctgctgattattgagtttcttgaattctttaatccggacgatcaggtccgctttcttttccagctggaatttggcattgtctaggttgctcttcacatctctgaattctagctcgagcttgttgatctctgaccgtgtcttttctttctcatttgtcacttttgttagagtctttttcaactctcgtgacttttcattgatgaaagcaatttcctcctgaatgtcttccagggtacgggcagttgaagggtcttgctgctttgcagaaagctcttgaatttgtgatttgatcgtcttgatctccacatcgtaacgcgcgatagtgctcactgtcttagcaagcccctcgacatcacgcttgctttctgttttctcgctgacctttccgtcgtgggtttctagcttctctagaagttggtcacgctgggattcggattcttgctcctcttgttgaagctccgggatgacggtctctgacaagcggacccaggtgtcgtatgatgcactagcagcgcgagcagtttcgagatcttcttcaaggctcttcagggtctcatcttcggcatcaaggccagccttcttgactagggcatccaacttctttgtgaaggtctggagttctgcatcgttcttgaacgatctttgacatgttcggcacagcttggtacgcttagcagcatcaagacattttgtaagatattctcccattccggcatattgatcagcgtctttgcgagcgagatcatactgtgcctggcgctccttcacaatttcagggtattcggaaggctctgcgtcgactgcttcgtggatttccttcacgcattcatcaagttccttttgacgctgcttgaggttcctcttggcagtcttgagcttgaactctacatgctccaattctcggctcacgccgtcgcgctgtcgctctgcatcggccacctgctttgattcgctatcgagagcttgttggaagcctcgctctaatgtgtccggcttccagtcgggaccaacgaccttctcgaggcgatcgctatgagctcctctcatcgtctgtaggctgcgttcgcggtccttcaattctttcttgaggtggtctaagcgagccaagtccccagccttcttggttgattcaatgagctcggtattcaatctcgagctttcatcctcaaggcgccgaatttccgcattggtatcctggatatcttgatcccaggaagcagttttggctcgctctttcgcgtgctcaaggttcgaagtgatatcctccacctttgactcaagcgcagcctgtaggccctcatcaacttcgatttcattgagctttttttgatgggttgttgcctccttgtcattcgcagcaatctgtcgttttgccgcgtgcttggtctcttgaagggcggacttggtttgcccaatctcattcaatttttcttgaacctcgcggagctctttctgggcttcacgcctcacacgatccagagattggttctggtcttttaagaggcgtttgatcttctgcatgaaggtgtcaatttcagactgatccatcttctcgccaataccacggatgttgttggcacgagcaatctcattaatcatgttctgacgcctttgagactgacgctcaaagttggccttgtcgttctcaaactttccattctcagcttgtttcagcccaaggcggtgccgagtctgctcaatctgctccttaatttccatatagctttccttttgtgactcttcttgttgctggtattggacctgcttcacttcgaattgctccagggtagattcaagccattcatcggactcatcaagctcaactagatgtctcttgaggttatcaatggtggtttggatacttttagcttcgatgcgcttgccctcaagagcaccgagcacctgggcataactttctgattgcgtccaagccttatcggcaagctccgcgacgcgccgcatctcttgtgacatccgctgggtctcttcgcgcaaggcctcgatttcctcttgaagcttgatggatcgtttttcagcacggtctgctttgtctttgtcttctttcgcatgttgctccataatcttatatttgccaagctcctcgttctgcttcttccgcagtgctttgatgttgtcaatagccttggtgtacttcatagcctcaaatatttcgtcaaacctctttttcaacacagacggttcactcattggccacagactttcgtcctggtggcagaaaatgaccgaatccagtacggcctttgagacgcccagatactgcggcatgatttggtccagctcagccactcgcgatgaaatagctgtgcgctcgccgtttttgaccataagcagctggccttctagggtcttctgctgtcgtgtggttttcttgaccgtaagctgtagactgcgcgtggcaaccattttcgctccggaagtggccttgaatgacagcttcacctgggccagtacctctttttcgccacatagtttcgggtcgtggatgaaagcaccgcctttgctgttcggaggaagatcgcccgttgtggcatatttgagacactcgatgatagtctagatccacgtcagttccctgctggtcgcaactctagtcgtccatttcgccatttcgtactgtttttcctgagccattgtaaccgacaatcaatgtgagaggtgtgtggaattggatcgtttcgctgcgcgtattatcgaaggagcggactctagaacaagcgtggttttatgagcatgagtgtaattactctccgcagtggccgcactcggatcaaaagctttgagagacgtaccccagtatagagagcttatcaatcttcgctacagtatgttagatgaccgtttgttccttttttttcctcgccgagctatagttgttgcacttacacctaaacctcagttagcatcgcgacacgagacgggaatgatcggcacgtacatttcgaacaaaagctatgagaggggcgtgtgagcccgttggcctttagctttatcgaatacaatcgaataaagagccaaacacagagagagctgagaaacgaaagtgctcggatcgccgttgaatgtgattgatcacatagtcccgcgtcgaggcgacacgaaatcacgtggattgcactaaagtgctgcgggcccacagggatcggcggctctttgtcaaccagcaatggccggctcttatttccagagttctgtcttttcgaggagatccagaccatcagtgagacgatgtgcatattctgagaggcgcatcgtcccaccccctcttgtctgaatgaaccgaacgtactgtctcgaatctggagaatgaaccgttccattttcaacgctcactctactatatccgtcccctcgtgcggtcatagttttttgagggaaatctcgtggctcttcatgagacgtcggatccagacgcactcgaacctattactagtgccattatatctcccttttaatctctctacactgcgctcgacatggctctgagtcgcccacaaccctatgagggtatgcctctacccaactaccagatgagatcgggctccaacgaggggcatccggggtacacaatggagcagcagcacgtccatgcatcctacggtgggctctatggggtgcaaggtgctcatcacgggggataccagggtgtacaaaacgacgggggctggacagaacgagttctcgatgaaatgaaggacctgctacttctcctcacaccccacggccaaatcacctatgcctcaccatcgtgcaagagtatcaccggccgtgtcgcaaaacaactcgagggaagtgctctggcacattacattcatcaggacgaccagccaatcttccagcgagatttggacgaatcggtggttgcgaaccaatcgttccggacccatttacgattccacaagaccaacggcacatattgtctcatggaggcctatggacacccacatctcgcaaaccaggatgagcgtgcagggagacccacgccggccaacgggcgctgcaccggatttttcctcgtgtgccgaccatatcccagcaaggtctctcaattgctcgactcttttttggaacacaagattgagaacgcacgtctagtccaacagattgccaaattgaagcaagaagaagatgaagaggcgaccgcgactcgagtgccctattctaggagcgaccaggatattcgtgcccccgtggccgaaaaccgattccaacgattcgctcattcgggggaaatttctagtgaccctgatactacagacaccgtagggccgaactcggatgaatccgacacgagccaatcgacgggctatttcgcagagcccaatacccgcgaagtttactcacatattgacggcatcgaagtcatgaccggtcttaactacgcagacggcgagagatcgcacggtctcagtacaggtgttaaccgtggccgtcttatacattgcgatattgacatcaccactgctgctgaccaagagcgcaacgctcaggaaggcgaccgccgtaaaaggctcaaggcccagcatgtctgtagcgactgtggaacagcagactcgccagaatggagaaaggggcccaacgggcctaagaccttgtgcaatgcttgtggctgtaagtattgtcccgtctgttgtgacccccgctcagcttgcttgtaacctgtctactcttggcacggaacgagctaacccaattgtctttctagtgcgctggtctaagaaggagaagaaacgccaagagtcggcctaattttcagttctcggtttatttgcttttcttgggctggtggcctgccaacccctcagttgtccgggtgctttgactggtcaggcatgctgtccatttcgatgaatctacaatgatcttcagacgagccccatgctcgctatcgcatgggtgatgatcttatgtcctgtgaaatggatctctttggtccgatgtatatagctggccgtgatttcttttgcaaacattgtgtactactgcactatggaacctatgtttttttcttggtaattcaaaatttcattatgaggaattaaatgatttgacaaagtcggagcaaatcaacagtccaacgcccaggataatgacggcatggagtatgtactgagtaggcacttgtggccaaagacaagcccacggagagggccaaaggaatgaacagaaccccatatgaacgccatctttgggccgttaaataatgaaggtgatgtatgggcaacaagacgtggtatcataaaacgcaagtggtatcataaaacgcaatttctcgacaaacaacaattcaacgagggcatttaggccctagcagccttctttggcggcggcgggaagtacatcggcgaccctgccgaactctccggactgacttcatacgattgcggcgacgggtattgaggctgaggcatacgggagttgtcccgcagtgggaggtccgatgcggtactaccattgccaagtcggttgaaggccagcgttcggggtgcgaagggcgagatatttcctccaacagccatgggcggaaccccgggggtacggggaaccatacctgatcgcggcattgggccgggggtcataggaatcatgctgggagacttgatgatctcttcttcgaactccttctcgatgcgacgctcttccctctgctccaggatcgcatcccgttcttcgggggtgatgaagcaggagtggatacagaagccgaggataattacatagtagacactgaaggggatgttagctaactgtttcctcgtagaaggggagtaaacaaatattagagtggaaagggccgaactaacaccatgataacagtcacagcaaacagtgctttcgcttgcatgcagtatccaatgttggactttttgtaggcgacactgcaacttttcgcaatgtaccacggggcccctggctgaggatgtctggggtctgacatgtcagacccagcctgatacaccgctgacacgatatagagagcgaccaaggacacgtggacggcgaccgcaacaggaggataaaacaggttcatccagtgggtaggcaattttgtgatgaggaagaaagtgcttaaaacagcaaggacaagattgtaactggtgatactgtttttaagtcagcggccacctcttgcatattgagtatgagtataatgagtaacttacaagctggaccaaaccatgggggccttgaatggtgtgtagttcgctgcagcatacaatgcctcgttgggagcactgttgaatccattgtctgctccatcttgccataataatgtctggtatagattatgggaagcgataccagtcaatgtcagcattacgatggtgatcggaaactccccagtcatcaaccaaagcacgagcttgtggtgcttatgcttctttggaaacaagaactgcattttggcgttgggtttggaaggttcgcaataaaaatcgactatattttcccaagctgaccgttcaaccgaagcgcttatggaagagttaaagctgtgtacaatatcagaccggccggctaagaccttctgtctgtcgcacgaaaagggctaaatgtttcaacgtggtagaggggtcagaaaagaaattagaagaacacaagtctgggcaatccggagggcgagcgttagatatgagctcgaggccaacaagtggccgaagacacaatccatcgcatgcaggaggggcacgaatcagcatgggaagagcccatgcgaagagattgatgtgtgtttgagaggtgcatctggccaatgcttgatggcggcaaagcgccagcgtaagtagcaacccggtcatcacaccaatgagacgacgaggatcgagggaaaccgccggtcgtcacacgctagcaggtgtgataggatggcagacctgcatgaagccctcaatcacatacttcccctcaataggatcagcgcacccttggcactttgagggaacttgcagccttccagtacgaagcgcccggcgaaccgctgctgggttgatgtgtcgcatttgtgactatgtagttgaccgtgcatatatacccatgctagccccggcgtcaggaaaatgggaacaaagaagatggcctctcattttcgaccatagccatcattaattcctaagttatcgagttctaaccttgaagttggaagtggtagttgtcgagtggcataaggaagtcatgtggtcggcagaatcccaacctgcgatctcaaatgcattacgatcatgccatcttttagggattccatcaactaaatccaagtccagctttgtagcatgatccatctcttgatatatcttgatgaagtcgttccagttgcgtccgcttgctcttcgctcagccattccaccccgcatcatccggcctagtcaacttgaattccccatttcaagaatcgcacgccaaatgagttcccagagagaggactcgattcctcatgagctgcgcacggctgcagagccccggcaaaatagactgcacccagtgcgattatcacacgtcgagcaggtcaacccctctgttcggctcctacagttcactctgactccccaagagaataatgtatggatttattttattttctcgtccgctgcctctttatatatgtccctatacccagtatcttctactcatacatcaagcccggctgccactcatggctggttgttgtccccacgccgttggatcccatatgccccgcacagtcggtggttccaatcacatatgagcatctgctatcatgcaccttcacccaatagatgtcgctgatgcattctacaggataacggtcaacagccattcagcttcctccctggccaatggcttgatgtccatattccctccaacacccaagccgggggcttcactatcacctccaccccggcagatgcggaggtgctgccgtcgccagaggcttctatagactcattagctggcgaagcgctagaaccatcctcagaatctcaagggcgaccaccatatgtagagttggctgtacaagactcgccgaataacccatccgccgcatggctgtggagaccaaaagaagagattctcggcaaggagctgagcatccgagttggcggaagcttcacctggcctcccactggagtcgatgttaatgatgttaagaatgtggtcttcgttgctggtggtgttggcatcaagtaagtgatacttccaagatatcatgtccgcgatgtatacaatcgtcatcacaaaccaagactatacttgtttcaatccctcatgagcaaattctaacacagtcttagtcctctgatatccatgctctcccacctaaacaacaacgaaccccacacccccaacccaacaaccatccacatcctatactccagccgcctaccgcaaatccagggaacagcctcggcagactcaatactaggccagatcctgtttctcccacgtctgcgccagatagtccgatctcaagaaagttcgcaccggctgcggatctcgctggaccttttccttacggacttggtctcgtcgcctgatctcctctcatctgggtctccctctgatctcaagatccaccgagagaggatatctgatcgtgatctgcgctctgcggctgtgggtattgacggtgaggtggatcctcggagcacagtgtgctatgtatgtggaccgcctgctatgactgattccattgtggagaagttggttgggattctaggggatggtggggagcagcgagttttctttgagaaatggtggtgagaatgggacgagattagtaacgacgtgatatattcgtatgcgattaattgcagtttgttagtcgatgaatgaatagtcaacgttacagttcaggctacaataagaacacaataggactaggagaaatggcttcaatatttttaaaaagataagctcccccgcagatgccgacctgacgcaggcaaggggcggaacgatatatgtacaggaaaataaaagaagggccgccggcaagaacggaacgacagtatgtgagagcaggggcagtacagacacgctggcatctcaatacaatatggggacgagaaatggaaaagagaatagagagagagatagagcagtcaggcttggttaggatgctggctctgggcccttgacggcaccgccatcgacgatcatcatttcgtcgattttggcttcggtttcaccccattctagacgcttgtatgtggatacgcgaccggggcctctgtcgaagtcgaagaaacgcactcgtcgaacgaagtcatcgtagccaccatagccgcccattccgacaccgccgccatagcacatccagagagatggcttcgcattgtcgtcttgctcgagcatgcaatagtcattgacatgatcactagagaacggttagtctttaaaacagcacaaaaggaaccttggaatggatgacttactgtccacaactaacaaacaaaacaccctcttcttcgagggcgttcttgaagccagagttgaatcctggtgcagtaggaggttccatccatgtacccttgaagtactttcctgacgtacgatactcagggagcgggatgtgaataaatgccacgttcatgtggatatggttatattcctggtgtttggatcttagactttgggcggtgtttttgaaccaccgagtttggctcggtttgatccaatcgtagccgcggaactgacgctcgtcgggggagtaagaatgcgtgtcaaggaaatagagggtcagggcagagtgtgtgcttgagccccagtcgaggacttcgacaacgtagtttccgaccccgtcaatgtcttcggggccggcggctgaaagagagtaaggtaggtcctcgtatatggtcatgagttgttctcggttgaggtcaccctcgtcgtcgtggtttccaaagatagctgcgtaaggaatcttgcggtcgaccagaagctttacagacttatagagagcactttgtgcatctggagcggtctctccgttgatctggtcaccagagaagactaccatgtccggcttctcttcgtcaaggagtcgttcgacaaattccaaggttcgggggtcggcttcacacttctggccagccaccgcttccgcgggaacagggtcacgacagtggccgagaccggtgctcatgtggagatctgccaactgcatcaccttgaatttcccattgtcgttgattctgggaacaggcttcttgggttttgcctgcggatgccctcttcggatactaagacgagtctctaactcttccgtcttactatccaggaggataggagtatctttgacttcccagttgggacgaggatcgacagcatccgctccataaaggacatcgacgtacgtcacggcgttttcggagtcgctagcatggcgggaggacgagcgcttgagccagatgcctcccggtcggggttcccacgattcgacttcggtctttgcaacaaattcagacgggggagtgatacggctaattttcaagtcgatgaccaccttgtcatcagggcccaattcctcctcctttttccgcttgaattgaacgtaggcactcgagatccagcccgagcgcaggtagaggtccttgtcgacgcggtaccaggtttctgggtctagcttacaactcgagaacggattgagggaggaacaggttgtgacggtcacatctgtgatcacgtagccggaataatgcgatggaaggtggccatggattgaagagggaaggacactgaatcgattgtcgagaatgacgaccacgaggagaatgaatgttgcgaataaaccgagctgtacgctcgctcggacctacacaaattcgatgttagcaacctgcttcacaaggagtaaaataatgtcatactagccggcgagccattatgaaatagatatcaccctggcaaggacttgaagaaaagcgaggcgccctgtcgcatgatgcccacggatttcaaatgtatagggcaaaggagaggaccaatttcggtcaactctaggatataaaggacaagtataatttgttttgggggtgaagttgcaggtcaccctcgacgcttgggccccgaaggcggtgactcctgaagagttggtctagcctcccgatgcttggtgtttggatgttggtgattcattgacttggcgattgttactcttctcattatccattttctacctatatgtgaaattcccgtctatcatcaacattcgtatgcaagttgcatgtctatacaggtccaccggaattcctctactggccgagcgaagtcttggcagccacatcgcccactgacaccttgccgctcaatatgtctttggaagtcgagaggattgtggaccaattctggaaagtcgtgtagggcattcccctgcgctggcagtaggtcaccagatctgcaacggcgttagttcagtgtctcggaatctgttacggttcgcccagataaatacctttgccttccttggcgaagagaagatcagtttctgcagccgcagacaaatcggaaacaccgtctccggcgtatagaagaatcgggcgttctccgtcgggcaatctggcataaggcttgatctccagggacttgtcatgtccgaagtggctggtgagtgattgtcagtgaggctgggggaatgatgatcggattgacatggcttacctgtcatcatggtactcaatctgccaaccaccctcgctgttgatattcttgccatctcggctcacgggctcgttggaaatgatggtgaggtggctggcgggcttgtggccgaggaacttctctaacaaggcactgatgatgggtcgcattccagatgaaaggatgacaatgggaacattgttttccttagcccagtagtagaattcctcgaagtatgggtccagtttcatgttctttaacagcgtgtcgatgcactggtcgtatggggtcttgatgctatcgagcatctcgcggaaggcatccctatagtgaagaaagactcattagggcttgcttttggaacagacagtgtctttaacactcaccggaagctcagagtctcgtcaaggacctggtcgttcaacacaaggcgcttttctcggccgaagccaatgttatcgatctgaatagcattagtgaagatctaggatttggcagcgatgcgatataccatgaagtcattgcctgcgattccagtcagcatgcaagtactagcactttgcggggaagcacctactgtcgtcgactgtaattgtcccatcaaagtcggtgaaaaagatgagcttaggcttagtctccatgtaggggagagcgttggaacccatgatcgctatatatagcaatagaaatgaatcgcagtatgtacaattcagagaatgactgaagaaaagcaggcgctaaaattaaagatgtgcccctcggtgactggggtgggtcgagcggtaccgcagcgggccagtctcagccggattttccttttctgtttattccagggctagtacttcacatttattgtttccacatcatgtctcgtctgcgccaggccctgcagcgcgtctttggtgtgactcctacaccaggcgccttgcgctctcgaaccattgacacgaacttctccattataaaaggtaattgtgtggcaacgcctcttcgcaacgtcgggctaacgaaacgcgcagagggagaccgagtcattatacacggcaaacagccctcattgtcaaaagcattgaagcgaggtgaaaagcttcagactgctcgtggagcagtggaccatgaaagcatcattgggaaacgggtctgggatacggtacaggctcgcaaaggtcaatatcctcacttctcgattcttggacatgacactgatatttttgttatatacaggcccgaacatccgagttagcctcccaacgttagaagaatacgtcgccctgacccctcgcttggtcacgccggtatgcgcatcactcttgtgaatcagacacggagatacattggactaacgctaccccagtagatctatccacaggatgccaatttgattgcttcccttctcgacatccatgtcaacactcctgccgctggcgaagtacaacccactctggaaatcctcgagtccggaacaggccatggatccttgacactacatctggcgcgagccattcacgccgccaataccactcctccgcctcgtccacctcgatcccagatcaattacctagaaggccgtgtcattagaccgagtgaaaaggacacggaacaaacaaaagagaaacccgccgagccagttgcggatccagcacaggaggaatgggatgcatggcgagcgcagcgcaatgccgtcattcacacagtcgatgtatcgccaaagttcgctgcactggccgagaaaaatatccggggattccgccgtggaatatacgcaggcaacgttgatttctatgtgggccccgttgaacactggattgccaagcagaagcagcagcggaaaaagactggcctggctgcgctgactggaggtaaccctgtagatccgttcctttcgcacgtcattctggacatgccttcctcaaacctgaggatcccacatgttactccgatgttgaagcgtgatggcctcctagtggtgttcatgcctagtatcacccagattggcgagtgtctgcaactgatccgggaccagcgactgcccctcgttcaggagaaggtgctcgagcttggctctggaatcagtggcggccgcacatgggatgtgcgttttgcgactaagaagtccggcgccgacccatcgtcctggactgccccttcagatgctgaggctgccagtcctgcggaagccgacgagcagtccaccacctctgatgctgcgtccgaggtgtccaccacagaggagcctgcaaaggaaggagagtctgtcttggtctgccggcccaaagttggagtgcgtatccagggcggtggcttcgtggcagtctggcggcggatcgaggaacgttatcccaacgtataaaacctgtactgtatacctgtattatgttgcatgtctgatacggattagacccatttgtacaatatagagaattgtgagaataatatcgagatgcccgaaaagatgtcataacataacaagagacaatcgcttcagagcttcgctttaccctcgatatccgcatctttagacacggcagtgtctatgccaccttcaccttcaacacccttagcagcctctacttcagtctgaataaccactccctccgtcccaggaactttgcccaaaatccaagccttcacatcctccaaaaagctctccgtcgtctcaggcaactcagcatgcaacttatgataagcgccctcataagaacgaagcttcacatcaccacctttctccgtcaaccccttaacaaagttctccgtcgccggatgactagtaacgcgatccccattcccatgtccaaaccagaaaggcagcccagtcttcacccaagccccatccccagccgcaaacatcccctccaaccaaataccccggtccaacatgccggccaacccctcgaaagtacccgtatcatggcacagcgtatcagccacgaactcgtcaaccacagccttattgcgagacatcaaatttgggtcaagcggggagtaccgctgcttatgcgggatcaactttgcaacaagtcgccccgctgagactgtcagctttgacgggcgggaggacgggtctatggcgattaggggggaatacagaagcacgccggtgaagttgggccgcttggatttgtctccgttgtagggtgactctgggtggaaaatgtagtttaggacttggccgccgcccatgctgtggcccattaggaagaggggcatgtcagggttggcgggtaggttttgcaggaaggagtgcatgtctgagaggacttggggggttgggcctgttttaccgcggtcgcggctttctttgacgctgcggccccatcctctggttttgggtgttagttggggtgttttataatggaataggtcgttttctttgtgggtatttatattgagatatcaggataggattcggccttggtttcacacttaccgctgatcgaaagacctgacctcaatgcctgccgatgccagtgttggaaacagatcgtggtaggcattgcctagcaagggtttttcgtcaatgactgtcttatggatggtgggttgtcttgacttattgctcataacagacatgatcaacttacagtggtcactaaagccatggataaaagctagaacagcaagtggagacccgctagtctatatagtagatcgccttgttagctttgaaactcaatacccttatcttgaggttggagtctatctcagcttattcagagagggatcacagctgtgtcgttaaatccataccttccatgtcttagtatacagctcaaggccgtctgggagaatatgcacgctttcttctgtagtcatttcggctattgaggtttgtataaaagctcgagaggtggttgggaggagacgaagtgcacggtgcacgtttcagcatgcatatacgggacctcggcaggaatgtgaagccaagatactaacgccattcagatccaccacgcccgcaattttatagttaaccctatttatacgattttatatcttaaagaatgatagtccactgcgtttggagactctatcattgacgatgtgatctagttaggcctattgtagtcttttagtggtcttttaagatatcttcacccccttcttaagttttccaggtagacagtagagaaaaaggcgagaaaaggcttgatctgaaagcactttgatataatctctaattatgtatatcctaacacaactattatacagagacaagaaaactatagcatagaatcgatacaatagtatcaaccatgtcccattttctagatgtcagctatagatcctacatccttttcttacaaaacttgccagcaatcttagtcgactgtaactacctcttcttctttgtcttttgattcatttctgtattcagtccatgatcggacggatgggtaagaagagcctccaggaatccacgggtcttcagacccacttaccaagatcttattggttcctagctaaatatgtcttgtccaatcatgcttcgccagtgacatacttctctactatatcatgtcaaaatgaccgtcaacttcttgtctgtcctattttgttaccttttaatctttcaatcgatgctatattacctgacaagaagaggtccctcgatacttaggccagcaatctcacaatctctgctgcgccctaaatattcagaaaggatgttctccgccgttcctcaagcggttaccaaccaccaacccaatgtctcatatcggtctctagcattatccccgagtgaagatagcccagatattcgtcagaaataccgaccatttatccttgatgacgagccaactgaggactgggtcaacaacttagacttggccaccgcagcagacatggcagaacataacctacaagtcacaaacgagaggctgagagttctggtactctatggaagtcttcgtaaacggtcatattctcgactagtggcattcgaagcttcccgtatactcttccggctcggctgtgacgtacgcgtctttgaccccgagggtcttcccatgaagaacgagattgatatcgcccatcccaaagtacaggagctcagagaactcagcgtatggagcgatggacatgtctgggtttctcctgaacagcacggtaatctagtgagttatctctcgccatagtctcaacatttccgcattatttacttacaggttttcctgcaactttagactgcggtgttcaaaaatcagatcgattggatccctttgactactgggagtgtccgtcctacccagggccgaacactggctattgctcaggtgtgcggtggatctcaatcgttcaatgcggtcaactctttgcgtatcctgggtcggtggatgcgcatgtttgccattccgaatcagtcttcgatccctaaggcgtatacacatttcccagatgaaggtcaaccgggggatcagcgactcatgcctagtggcaacagagatcgtctggtggattgcatggaggaatttgtcaaatatactattctgatgcggcctcacatcggtctttttggtgaccgttttagtgaacgggaggaaaggaagggaaaggaagcgaggataaatgtaactacggctatttgaaagaaattgaataatagtgtgtcagggaggcaatttattatggtataattgctcaacatactttgttatcatagctggcaactcgatggctaaggtaaactatgagcacattcgttatttgattggcaaattggattcgaattctagaagatactagagatacctgaccaatatcaagattagacctttattcagatgtcatttgatgagacagtccgagcctagcatcaatcatccagcaaaccattccactccggaatctcctcgatcaatttccacataaaattctccagcttattggcacatttggtgtataccgttgtggtaccattgaactgccgacagttactgaaaatcaatctgcaatcctcgacgagcttttccggggtggaataaaaaccttgctccaatcttccttctatggtcgacagatccatgggtgatacgataacatcgtaataatcagggacttcatctttgtcgactggtttgacaaagggccaggcatgctcgtggttttggatttgattcagaaaacgtcgaagttcgttgaaatgaggtccatggcatggcttccgctctagctcgtccatagctggggtccagccagtctctcggatagcagggatagaaagcggatcgagtggagtgataacgccgttagcccattgctgaggtggtttatggataacatggttcttgctgaaggtacggattttggccagaacagactccttctgcttaagaagcatacggccagcttcgagataccgtatccggggaatcatggagcattgcataagtgtgcctccgtcgtaatccttgatacaccccatccagatagatctatcgagcgtgatatctttagtgaaaccttgctttcgaaaatatccgatagcgtggttgtcagcgtaagttaggaaattcatcactggggaagtagctttgacgtaatctttgaaatgcgccatgagatgcgctccgtatcctttcacctgatggtcagattcgatcgcgaagaaaacaatttcggcaaacttgcgttctcggaattctcggtatgatattccgccaatgacctctaggggcattttgacaagtgcgatagacaaatgagaacgatcgtaaacaagacgagcgatgtattccttaggcatattaggaagttgcttttggaacaggcatttcaaacccgtgaggatgatcgtactctcacgggagccatcattgttgacgactcggaactcgatctcgccatttcgttcttctaaaacagccggcttaaaaaagatatccgttagaacattctatgcagcctaacatttgtagttttagcataccttgtctgggaaaggaacccttccgatcggggctggaggttgaacatccggtgttgtcgaactatcgcgagagtcttcgattctttcagcctcaggggtaagactcggtgcttcagaagatgtccgcttcgccaggagagcttccctgctgtccgctgaagatgacagtgactctgtgtcgatcatctttgttgaataccggcgatcatgcgagatgtaaaagcaaactaatgcaggtgagcgggtgtgaatgagcgctctgaagtcgctacaaatgtcaggttgacaagagtccggacctcttggtaagtggttggcttgataattgttccattgtagcaaccatcgcgcgttcttatggttacgatcttttggcctagttacttttgcaaccacttgggtgccgcagcctaagttcacggattgtgcactgcctgcgaacaaataaatacaacgatatgtatcaataataggtgctaaactccttagaatgtcaaatgctgtatgatactagacccatacaaattgagaaaactcaaaacaggaggtcggggggcgcgggccccnnnnnnnnnnnnnnnnnnnnnnnnnnnnnnnnnnnnnnnnnnnnnnnnnnnnnnnnnnnnnnnnnnnnnnnnnnnnnnnnnnnnnnnnnnnnnnnnnnnnnnnnnnnnnnnnnnnnnnnnnnnnnnnnnnnnnnnnnnnnnnnnnnnnnnnnnnnnnnnnnnnnnnnnnnnnnnnnnnnnnnnnnnnnnnnnnnnnnnnnnnnnnnnnnnnnnnnnnnnnnnnnnnnnnnnnnnnnnnnnnnnnnnnnnnnnnnnnnnnnnnnnnnnnnnnnnnnnnnnnnnnnnnnnnnnnnnnnnnnnnnnnnnnnnnnnnnnnnnnnnnnnnnnggggcccggggcccccgacaaagtatacaaagagccacaattattccttccagtagcattgcgataatatccaaaccaaaatgtccacattcaatggcttagaaataacaacagcaagtcgacccatcccaccctaccaaaaccccatctaacccaaccaggcctcaatagtcgccgcactagcgagcgaaggagccatccacccaatagacacagtaataacacgcatgcaatccccgatgtacagcagcgtctacaagcacctaaacggcacactgagccgcgcactcttcagcgggctataccaaggcttcgggccaaccttcttcgcaggaacactctcatcagctgctttcttcaccgcatacgaagcctcaaagacggcatttagcaatgcacaggccgccggatatatgctcggcgtcccgcggccgctgatccacgttgctagtagtgctgttgccgaactgcttgcatgcgctatccagaacccggctgaggtgttgaagcagaatgctcaggtttttcagcggccagtcaatgcagacaggggcccgtctccgacgatggagatgttgcgaaggtttcggaaatatccggctgggttgtgggccgggtatagtacgttagtggcgagtcaattgccggggatgtgtgttacgttctgtttgtatgagatgttcaaggaggatttgcttgagcggtggaagacggggaaagatgatattagacagcagcttgaagcgactgttttgggtgctggtgctgctggaggttgcgcgtcttggttgtttgttcctatcaatgtggttaagacgaggatgaggcttgcggttggtgatcagatagatagcactcggtcaggtctcaagggaaaccctggcttgccatcccgtatcggggcatttgctattgctcgagatgtgctgcggaaggagggtgtagctgggttatttcgggggtctgctttgacctgcgtggcagcgattgtggggagtggactttatattgggtgttatgaggggacgaagatatacttgtgcaattatgaaggctcatagttggcatggttggagattattccaagtcaaatgtatcttaataaatgtataatagaatagaattactctcctccttccgtgttgtcacctaatagaaatatgtaatgcggtatcagcaaccataagcgtatagtgtcgcgatatataagcatgtaagggcatttcaatctacatgtatcagcactctactggccggtctacatagaacaccaaaggttgaaatgaacaaagccatgctctattcttgattgaacctcgcataggacgaacggtacaacacatacataacagacaaaactcccttcgcctggaaaaagaaaacgaaaagcaacctcgtcacgggcaaaaagcagatacccttcaccacctgttccgcccgaacaccaatccccgatcctaagcatcgtgaagccgtctcagatgaggttagagattaggtgaaatgaaaccgagataaatcaggaaacttaaacggaagaagacacagaagacatagagagtgaggttaagagatagagagatgggtttggggggggagagaacgccagggagtaaatggacgccgtctcactacatcaacgacacgaggcaagaccattgttccaggaacagatactccgctagcaaatcaagaggatacagaggaggataagcgagaggaaacggaagaaggacgttcataagcaggagagagaaaacacaagaaagaagaaaagagatacgtaaagaaacaccataagacggctgactagagagccaccacccaaaaagattccgaaataacaagcacgaaggaaagaaaccggttggaaaaacaccccatctccgaagatttcaaatgctccatatcgttagtgccgttgtggcccaaagtccgcctctaccaccttgcccttcttgccctttaccgtaaactctgcaagaagcgcgacatgatcactcgggaagtggaaattcgggaacccgggcacgcggcgcaggtattccttgtccacttcgccgagcagcgccgagacatgcagagtgttggaagagtaccaaacataatcgagaatggctgtgaagtcggatgtataattggtgaagctcagttctcccatggaggagtaggctgacttcaacttgaagggatgtgtcatacccacgcggctgaggtttccgtaaagtcgcttctccaagtcgggatggtcttcgggaagtcgtccagtggagatcaagttataagccgcagacccaggtgaggagttgaaatcaccgcacatgagaacagggatttgatcgccactggtgtactccatcgatggggcaggttccaccacaggcgcggtctctgagccactttcggcctccgagaagcggaatgcggtcttgtccgtgcaggcgggccatttggcgtaattatccgaaagcttggtgatctcctccatcagaatcgcagtctggatcagcttgacgtccttgaaggcaggatcccaatacagatgagcgttgacactgatgaagcgagcaccagtttgccggttttctaagaagatcacaacggcgatgtggtccttctgccaaagtcggttgtagatatcatcttggcccttggcgtcgggtcgacggacggctgtctggccaaaattgatcaattgcttgtccaagaggatgtacttgcttcccttgaagaatgtagcacatccatcgaccatccgggcatcttcctcttgcatgcccattgcacgaccacgtggccagtatacacctttatagtcattgtaggcaagctgttcccggaagaaattgttgtaacttccctgatcaacctcctgaaggcagacaatatctgagttgtgggatcgtaattcgttgagaataagctcgcggcggtattcccaggacaggacacgtgagggcacatagccgtagtgcgattgggttgcggaagagtcacacagggtgttgtacgacaatacggtgatcttttcggtattgctgttggacgatgttgaagtatcatcaaggatcacccagtcacgatcgggaggaggtaggtggactgtaatgataaagttagcaaaaaattgagcggaggaagcaggtagaacatacctggcatctcttctttcaggtacttgatgagagccttggttccatccttcatgatctgagatttcagaacatcgttcagggggttaccctcgatgcccaaggtttccaaccggtaaaggtaccccatttcgtaagggagagtgcgaatgttattatcgaagagaaggagtttcttgaggtttgaaagcatgccaagttctgctggcagctccgtcaattcattgcccgacaaatccagatggttcaacttccgcagttgtccaatagccgggggcagcaccttcaacttgttagagttgaggtacagcttctcaataaaggcatagttgaacaacgaggtagtcaaagcgcgcaatccttgaccaccgaaatcaagcgcattccaaccctgtcggctagctggcttccccgcagatgcaccatttcgcccatctgcgccgttttctgtgtcggtgttgctggacatgagctggattcctttcgtttgttgcgcaatgacgcgggcatggtagtggggagaagtagcttgtctcgattctgccgcaagctggagctgctgctgccaatgctcgttcattgattcatcaaggtcatcgtccgcggtcggtactccgttctgcaaatgagtcgaggtgaagtgagaagttgtcgtcgtggccagtgtgccgccggggaaattgtgttgatgggtgaggttgtgggtcgcttgtgagtggtgggcatgatggtgcggttgctgtgtatgatgagagtggtgggtttgcgactggaatttcgggatcggcatgccaaaccgctggtgggcttgaccgccattcatcataacatgctggccttggtgggtttggccgtacatgttgttaaaagggctgagagcagcagcctggttgagggcaggggatcgagagggggagggggtgtcgttgttgaatttcagtcgacccgtcggagaattggtcccgtttcgaacaatgtgtcgctggtgagggttctgctgtgcttgtgcttggaagtagaactgcccggccccaggctgctggaacctgtaggtaccatctgccatttaacgtggcagacgagaccgtgatttgtttcccggatggaaaacctgttggttggtgggcggcgctaagttgagttgggtcgagaagaggagaggagaggatcggaggcggtctcttctcttcttccacatagaggcctaaggcaaagaaacacctgtatcaaaccacaattggaggtcgccggaggctttggcactgagagtatctttatgtgtgcaatggagcggtacctaagggcgtagattgggcggaagggtcaaaagaaggcgtgatcggaaaggcaaaaagagatcgagtttggtgatgagttgaataaagaccagtggggcacgattaacgtagcaaagaggagcaaaccagacgattgtctccaggtcgatgaggacgtcctgagatgacactggtggtttgcaacgaggcgggagtcacgagatcacgtgaatcgccgcaagggccaaagtcttcccagctttgatgaggttgaattgccaagacaaaccggttccctcaacggttggaagtatctttgatgagagattggatgttgatcacatattcttcatctatcctgcactttcgtattactttgtgatcgatgggactgtttatataaaagcagccacgtggtcgccttgcctgccaaaactacgggcatacgcagctgtctctggcgacctaagtcgaagctgcatggattttgattgtgcctagacatcttgtttgaagctagccaacactacagggtgtacaatgaaaggcatcgggtctaggatggagatatataacaagtggccagacctggaccagaaggttgaaagaatgagcaacagcctgatctattctaagcctcgctaataatatcctaaacttctcaaatggagtctgtctttggttttgttctataggtcataggatcctgtgtcaaagtacaacaaggtcagtgaacctcttggcgtgaactgcttgggcgagacactatgttgcaataataatgaatggactgattattcaatccacattccccaaattccacaatcgtatgattaaggagtatacaacataggccgcttctattactatgctgtatattgtatggtgtttactccatactagcagtgataattggctaatgccttggcacaccaccctaacaacataagatatatggggtacggagttgaaggatcactatcaaacgatgtctaaatagagggttttctataaataattccaatcctcaaataatactccttctcaccttgagagtcctacgagtagtgaatatagagatatgtgtcattgagatgatctatgtacggctgctgcaaggtatcacagacctagtataactcgcatattcacaaaaaaggggtatctgcagcttaatgcaaccacatgctctagaaattaccccgtacctccatcttcttaccgatcatattcgcctcgccaactccgtctatattccgtatatttccgggtcttcaaaaatgaaactagtcctaaaccaaagtacaaaagtacgtggcagacgctattgtgtcgatcgaattctcgtatcattctgcaggtacgttaatactaccctgcggaaggggcacggatcacactgcagaccaagacgatcgcgtggaatagtccatggacaagtgcctgggacttagcgtagggcacggggtaagccggtagattccagcgttgtatcagataaagcgacagctcagtctcagagtgtcggggcccagactgcggatccaataaatcacttggtgatggatatggcgggtagggatctccgtgtgtatccagttttaccgtttgaattggatacggagtacggagtacggagtacatacgagtctgctagtactctcctggctacactttgctttttcttttggatgtatcttatcaatcatagaaagcattggcctatatttaaggacgttatactccggacctcgtatatggttctagcccctgaagactatatagatcaaaaagcaaaagcgacctaatatgcaatagttatacaacatccatcacttctatactccgtagtctcgacccgttaggccagcattccctttttggcgagggaaccatgggttatggcttcaatgagagtcatgatgtcaagaccggtataaaaatagggagacactcattcgcactcttcacgttcactcaatgtcaaggtaaaacaccccaatactgatattttactaccggagtaaagtactgttactgttaccgtgaagacacgaacagactaaactagactcgagtggatatcaacttccaggggtcaggtctgcttttttcttccctccttcccccccatttcttcttggacttctcgaatactcttcgcttcgaaggatctgcgttgtacgcaaatccaaaggattatctgcaggctcagtccttttgttctgacgttgaacaagaattttcagctttgcgaccggctgcgctaagaataatttccgaagccgctttggtcccctgtcacttttcctgttcgactctattttttcgatttttcgttttattttattttatttccctcggaactgtcttccactcgaaaaaaaagcattaaaggaaaagaaaagtatgcctcgttcatgaaatcagtcttgcgccgagaatgcgaccgaacccacaacccatcttcagagtcataggggacaccaatcgatacacttgaagtgatatggacgtaatggcgttggggttctcagccgcagccgcagccgcctccggttccgacctacactccaacatgagctcgacactggccgctacgtcctcctcgtccttgagttcactcacggactactcaacataccctctgatgcgctatggtggccgcacctacttgcgcgacccggagaacgtctaccctctgccttgcgacctacccgagatccaccgccaaagcttgcgcacgctgatgctgctgcgcgtcctcggcggcccattttgcaacccccacctagccagtcggccgcccaaacgcgtcctggagatcgcatgcgggtctgggctgtggtctggtctgtgccacgactacttcgcccgcaatggccatcccgatgtggcttttgccggaatagatattatctccattgcgccggatatgcgcaagcagggaatgaattggcaattcaaacggcatgatctgcgtcggccccgcttgccatttccggacgactattttgactttgtattcattaaagatgccggcatgtgtccgtacagtcccgcgcaatcagcatcgggcttgagcgagcccctgcgcgtgttaaagtccgggggcatcctggaggtgtgggattcggattggagcttccgctcgctcctgcccaatccatccccggcgcggaaaaccacatcgaaggaacaggagatcgccgacgaaacagctacctatacattctcctcggccacgccgtttacacgagcgcagaacaagttcgtcgttgattataactcctgggtggaaaagtcgttcgaccgtctcaagttgacggcgctcccgtgcgcaaccatcggtctatccttcaactccgaagtggacttgctggaaaatatagacagtcgccgcgtcgcaatcccactaggtgacttgcgctgggagcgcgacggccaaggcaaggattccaagagccgtccacgcaaggccctgactccagagcagatgtccatccggcgcacggctcttctcaccacaatccagatgattgaagggctggagccgatattgatggagtctagcggaaagggccgggacgaatgggaccgatggtgggctgcaatgacagccgacctcttgcagaaaggcggactcgccagcggcgagtgcctcgaagtgagcgcctggtggggtcaaaagaaatgaaccccttgagtcaatttggagttccggtgggcaaaaagtcaagtagtgaccgttctgcactttttattggtgataccccaattttatttctatctttctaggtttctaacatgcacatgatctggacatttttagagaggtgagagtcatggaattatcaggcctcacttccatatcgctttttcagcgttcggtaccgcttcaaatagtacctggggttttgtttatcttgttagttgccatcaacgcaaattcttgtgatgggggtcaaaatagttcttgcatgatgccatgataatgaggagtgaacctatgcacagtgtatctagccagacactacccattatgggtgcaatgtatagaagaatgacatgtacgaatgattccacttccagttgtaatgaagcaatataggcagtgaacgaggaagatcggacgacaatgagatatatagggtagggaaaaagggagggttatagggaacagtcttacagtgcttccacttctacattgaacaattagcaaatatcctgcaaccgagtaaaggatatgaatcccagggacatagaaagcacccacctttcttcacaaactccgccctcgctattccctttcggatctgctcatcgtcggtaatctgagtctgacttgcaaatgcacggtgtagacgatcccggaaatactgatagcccagagggtattcccgtcccaagaacagaagctctgtatctcgggtgattagcatgtagcatgtaacagatgacgggcttgcgactgaagggaaaaggaatccaagttatacggcttcatacctttgtagacgttaatgacctgtcgacgtagctcaagatttaccattatcgttccatccaagaactaggatagttgaaggatcaacttgggtggtggggatgcggtgcattaaaggtaggcggctgagaagcttccaaacctcgggtgtatcggtgacgggcctggcggcctccatgacatatactaccatattccatgttcttggggcaatatgtattttatttcttgggtttacgtttacgtacgaaactatataaactctgtaattataccatacatacttatagattaatatcaatacagcttcggttcaaacgccctactatattcacgcggggttctagccgacctcggccccaagcttctgtttatcggttatcggcggacagcggtctcgccgaatccaacaccgcaactgtctctctcaacaaccacgcgcaacatgctccctcgatcagccttccgagcgcagctatctgtctcaatttctctgtgctcgaatggcgggcgtcgtcttttctctgcgactgcctcggcacacagtcaaaacctccccgactcggccccgatcaatccacgatggctcacaatgaccaagcgaaggatcgggaagtgcctgatgtttgggatgaagccagctcaggttgacgaggggggcaagattttacagcaattggctaaggaatggcgggaattgatcgctgggagtgagggattcctcacggataagaagcgacgtagtttgtttcgccatagtgttgtctggggagaacaggtatgagttgggatatattgctatatatacgatggggatgagagtcattaatgctaagtctgactgttgtggattaggatattatggtgagagcattcgtgcccctagtgcgcttacagcatgcgctatcttggatttctggactaaagctaactggatgatagggtatgctccgcctttttttttaaaaaaaaaatatttactagtactccaattcatggattataccgtactaattagtccaaggtcacgtcaacaacgttacctatgttcgatacgcggagaccgcgcgagtgaactggacgcgcaatatgggtaattatatcgatccggcaaacaagaaagcatggataaacatgctttgtaatacgggaatcgggctcattctgaagagtatcaagatggattacaaatttgtactgtatccctgagacccaaaccccacactactggaaaacaactaagtagacctatttacttactatcacgcagcccatggaatccccagacaaaatcaccgtttaccaaaagctgctcccagacccatctggacatcttgcatcccaatcggccttccgattcgaggtcatgatcatgtctgaagcccaccaacgccccgctgctcgttgcttcgaggataccgtggtctatgactacggtaagaatcgcaagaccgagaatatcccgccgtttatgatgaagcagtttgagattatgtgggagcaacaggagcaggagaagaagcactggagacggaagatagctgagatcgacaatcgggttcggaatcttgagcttgagagctgggatcgggttgatgccgtggaggataacgggtctgcgtcgcagtgatcaaagtgggggaaacgttgaagagcggattatatgggactccttgattgacacgttgtaaatacgcattcctcaagcatacctgactactgatgaaatctcggacgagggagatatggtcataatattaatggtagcagcggcgatgaaccgacatctcatttaagaaatgatttgggcaaaattggcttagaacttgatccaggtgtaattatacaggatgagaacccacgggtttgaatgtcacatcatgtacatacatgcacatctaacccgtgatcaaaaacagccctaattcatgattgaactgctccccagggccacaacactgaatctacccgttattttattcgcccgcagacatcagctgggtgttcgccaaagaaccattaccatacgaatcagaaacagagatccacctttaactccactagtcaaacaactcaaagtttcaacctctttgcaatctcaatcccctcggcaatggatcccactcgtgcatcaatcgcatacccttcactctccaacttttgcaactcagccgaaagctccgacaccggaagcgtgaaacattcaatgaactcattatcctcgagatcaggctttggattctgattttccggaagagacatgtcaacctgaacgtaaaccatgttgaaattggcattgcagaagccgggatctggacaagtatcttaagtcagctaatatccagtaagacgaacagcgggcttaccaaccgttatacataatgccagtggttttatcagaaacgccgatataccctgtctcttctttcagctctcgaactgcagcttgctcgattgtctctccggcatcgatcaatcccgcagggagttctataacgacctggtcgattggaggccggtattgcttctccagcaggatctcagcgccgttcatattattcagaaaagcgacgatgttgactccatcgacaggggagtctgtgggccttgtctacgatttgattaggtctttacagttgcatttacatataggttagaaaatcgtacctggcgttcggcagactcccagtctctcttgactccattgggatcgatgtagttcgttttgactagtcttttccatttggcttcttgggaggtctaaggccgtaagtagctgagagtataatagtcgggttaggagcacataccaagggctctcgtgagagaaatgtggacttaagttgcgtcatttatgtaattgcccctcggcttttcggaatgggaattgcactgcgagtaactgtgacctaaatactgggttgtaagaatgtcccaattgattgcaatcgtctaaagcgggcagtgcccgcgggcggggataacatgatgactaatgcggcgctggacccccggggccggggccgggcctgcccagattgacagccttaggaatgtcaacgcgtgtttttttttaaacgagctaccgtagcatatcatttatactcattccgaatgggattgtcaatcatctttgcctccagaaatctccttggtaacattgtgttcttagggatattgcctatgagagcaccgctgttctacacgcatgacagggtccgcatgagttcatcaattataaacaacgtcaatccttgtgtcgctgtctgtatttattataccgatccccggcgtcaccgttgctttggaatgtgaaaggattcaccctggacctactacagcgccgatgtttaccccattagttagcaaagattatcttgggaggatgaatacgacagttgactatcgtgctcggaagatcagacatagacgggtgtttatactgagtctagttgtattggggactttagtgatggtttaggtactactacatgcagctgtatatcggtacatatgtagttccaagattttaggtgtagtagtaatttgattttggccaagattggccaaagtcttggttgaagttaaagttaacattatgcgggggatggaatctgcctagatgagcttcgggttcatttctcatgtcaaagtatacattttcatttattgtgaagaatcttatctatcccttgttcattccttgagcatttcatatgtcgctttctttctctgacatttctacagtcattgctggatgagaaagagatatctaatgcatatattccgttttcgacatttcaagagtacacataggggccatattttccgatccatatctgttttgagatatactatactagaggcagtattcatgtgtatacctgtggagtataaatttgctgttaggatcctagtgtttcaggatacatactaactgcatgcggttaaagtaaactttaagcaaatttgcctcaatgaactacaaaagattagattgttcaattgattagactatgaatgaattatagaggctaaaaacctccacaagtttagccacttccgtagcaattactggactcaaagaccccgccacaggaggggagagccgggattactaggaaagcgaaaggatcgaccttgaaaacccgaagtttatcggacccaagcaaaacccggttctaaaataggcaaggcggacgcgctagtggaagtgtctgcaattgtctagaattgcctatgcagcttattgttctgaactggggctgaaaatctggaagtataaaatgcgaaagaagtgatcgagatggtgcaccctatatactccaggtgagacaatggtagggctcatcgtataaaaataacttaagccatcaccaagcccagccgtcgggccgatctttactaagcttgtggctgatctacgaaacccttcagggttgccaagcccgggtatcgtataagaggggaaggatcggaattggcaaagactgtacggcttctgtcttttactttaggatatcttctttacagtgtatatagatatctagtctgcacgaggcatcttgatatatccaaaaacgtcaccatttggagatctaccgacccatgtactcgtatgatacggagccttcaggaagatgcacgagatagccgagcatgtgatgatccaagaaagaatgtggacgaccctgttgatacacacctttgatacacacgagcttcagttccccgtacttaatcccatgatgctctccaggttcgggattgcgtgttcatacatgcaggcgcatccgcaagcgagtccccatggatccgtaacacatatcataagtccggcacaagactgaccccgcagcagacgggtcgagaaacggtcgatcgacaatccaatcagtcaggttgacagcaaatagggaccggttatctgaacaggctttcaagttgatctgtataccgtaggtactccgtcactagcttatcagcactagtcaatccgttttgaagaaagtctatatagcgccgaggcaacgaaaacatcagtatcgtaaactcggctggataaagcgaaaacacgcttaggattggccaatgtgcaggtatccgcgctgcaggacccggcaaccacaagccgtatagctcctatatagggggcgtgacctgtcaataagccccagagtatcgtaagatacagaggccaaagaaagaaagcttggcagtggattggccgtattgactgggattttccatgcagcaactccagatcgacaaagaagccacgggaatatattaccaggagctctttaattgaatttgcaatccggcgtcgcgcaagtagacagtaccgacgtgacatagtggcgaatggtattgaggccaggtaccgcctacccgaacggcaccagtgatcgacactgaatgacagtaccaataccaaattctgtttctttcgacttcatacaattccacctgggcactttttccccttcacgcttccacgtagagcgtcgtctcttgccattctcgctcatttcttcttttccttatacatctacttaccatttctttctcatcttcattaccatacgagccactctgcaccatttccttccccccaccatattcaatttcagtccgttttcgcctttttcctggtcccagtccttggcttcatcccgccaagctgactcggacctgggtttcgggctccctcgtccatgacacgctccgctgcatctaggaagaaccagagcaatcggcaggagaatggccttgtcggtcccggcaagaaattaactaagcaaaagtcaagcggccatctgaacggcaactcgggcaacggctctgctaccggtccgggcgcgtccgctcacttcgatctatcctccgtacggtctgctagcgatacggctttgatatctccgacggttgccggcaaaggaggagatagcacgaaggcagatggcaatgtgcgtgggatgttgaatggacatagcaagggtggagacatgacatctgcgcaagaaaacggcgatgtcgcccagaatggtggcatagcaggtcatgtctctcgcaatggaacctcgaaacgatccggatccaatgcttcgattaatccgctccagctcgcatcgactatcctcaaatcgtgcccgatgtacgacactatcgccatcttgatttttttgctccagcttccaccgatggtcttgaccctcgttcagttcttattcgcctccttgactttcatgcctcccagtggcgccgcggccggttctttgtcgtcgaacttcgatatttttcagggtccggctgggacgccatctctggggacaatgattgcgatggatgggttctgcatacttctctggggccttttcatgtggaactgggcgcagaactttgccatcgatctcgctcatgtccaagttgctatcaccttgggtggcgggggttccgggaagaacggcggggtcaatgctctctgtgtcggaattgttctgcttcttcatcttgttcgcagtaaaggcatccaggactttgtcttgggtcatcttgtctctgctaaactgctcagtcccgatcttctctcccaatattcgcatctgctacccgctgagttccgacactccgaagcacaaacgtctccgagctggctccgcagccttcttgcggtgcatatcctcgcacaagctggaaccgccatggcgcgacgttcgatggccaagaatcggtcaccgacaccgttacggaccggcaagcggggagatacggaggcttctgcgggatcacaaggacaggcagattctgctctggaatctgctgccagtgtttcgtcttgtttcgtgggacctgatggtcagttgaaagacggaaaggatcgtttcacgtcagctaagaaacgcagacggcaagccaatcaggttcggagccgacagccgttctgggctgcgcttgccagtacaaaagtcacggtgatgagggaatatgaacattcgcgggctatctccaagacagcccgcaatctcacaatgacggaggaagatctccagggggtgtctctcgacgacgggttaatatggattacggatgtggatagctcttcgattaaattcgccgcgggtgagtttaccgatgaccccgcggtgtcaggttcatttgaagccggtcgtttggaaggagacatggaaccattctacgtctgcgtcaacggtgcgctttgggctaccgcttcgatatgcagagtttcagacgccaagggaccgagcgttgtccaatggcggggcgagattgctggacttgctcccaattgcgcatacacatgtgcatttgtacgaagcgataccgacgaggaaatctgtgtcatgagtgtcaagacgccttcaacgactgacacagagcaaggtaagttcaggctaaaagacaacgtctcattttcaataagctcattgcttgaaatagtcatttccgcggtatcgacacccccacagccgacctaccgtccatcgtcccccacaacgacgctcaagaactctatcagcaatgcggaatcaaagttgaacgaaaagcgcaatcgtctgaaaaagacgaagaacgaccataaagctgttatctcgaaaatccggaaagagctcgataacttcaatgctcgcctccaaagcggaaatgacgagaatcgccaaaagcagcgttcgcttcaacttgaacgaaacatccggcagaccgaagaggctactgcggtactagaggtacaactcgacaccatggaaagcgttcctgaggaggagatggaagagtgggcggcgcacaaagcggacttcgaacgcgagctggaacgtttcaattcgaccaaggaagaggttgctgctgctcgaacggctgcagctcagcaggtggcggcactagagttggaattgacgcaggctgttcagaagcgagagcgtctccagggtcgccgcacccgggtgaacgagcagtatgagcgtatcatttcagccaacgcacaagggttgaatgagagagaacgtcgggccgctgaacaatttgccagggaacaggaccagtcaaagatggagagcaatttccacgagcaattcgggagcatcagccaatccgtgcaggatttccagctgcgcacgagtcaactctggcagcaggcatctgcaattgagcagtccatccagcaacaacaacagcaaatgctcctcgagtctggtcctctcacacccgaaggcaacttgccgggcaccaatcctctgcctgagaccagtggtccgtcgttcaacgcatctacgaccactgcacctagcgctcgatctctgatggggggtcttagctttcctcatgcgagatctagtccactacagatttcgtcttctccagtccacgagatgccgtcaaatccaactagcccatcgcaagaccttcccttcctcccacagtttccaaactctcctgtcggcaacgtgggctcatacttcgggtcagaaattaaccaccgagaccgttcgttctccaaccgctccactcgcagcagccaatatggctctgaattcttggacacgaaccacttgccacctctccagcttgacctagcagaattgcttggtgagaccaagactcggcctgggtctgatggtttcctgcatcaaggtggccgtacggtcctgagccctttccagcgagcagtaagccgaggtagtggcagtggcagtggtagtggcggtagtggcagtgggaccggcagtccgcactcggcacgagactagttctctcggcggttgctgttgtggtctcatgcctagccacgctgtcaacccgccatgcttgtcttctgagaagtggcctcaagttttgtgcgtccgtgcttttggttccgtccggttggattcccgccttccgttagtcaatctttctcggcctgcgctgtgatggctctggtttattgggccgttgtagtgtggcacgcatctcgcgatgagatgacaactatatggattcgatcgaagtgagatacatgacagctctgttcctaacgccgaaaaacaaaagtgttctatactcggttcttgtatactctctctcacaaaagcgtagacgcatcaatatcatgaaagcatttctcatcttcatctctccatgtctactgtaggatcatagtggataggtcgtcgatttggctttgatgccatgtctaatcaaaagtatatatccagcccaaacgccgttttcccaagtatatacaatggtttgccaatagcataagcgataccgtattcttcatctatatgaaaccagacatggctcaaagttcaccccccatcttccaaaacttggtatttgcatacgttaaacaaagccgctcaggtaaatcattcaaggccttatcgtcttgtcccagtgccaaaacagacccagagccctcaaccgcccgaacaacagtacccagcacgatggagtgatcattcacatcaatcttctgcggatgtagggtacattcaaaaacaaaaggaaactcgaccgcgtcatccacagcgattgcttccgccctccgcttaagaataggaagcgatcttgacggatatccctgctcgtccttagtaggcaaagccgcgaactcaaactccccatgtcctctcagcatagaagcgagtgcgatattccccttagagaaatccctggccagagtagcagtcgcgggactcggtgcaagtaaatgaaccaggaaccggcgcgaggcaagcaacgcattcaatgtctccgatgggcggcgcacgttgaaagagatcacagggtccggggtgagagtgacggtgctgaaggaagagacggtcataccgcggaaggaggttatattttctgaaccggagggatcggttgctgttatgattgcgacggggtatgggactcgccgcatgaggaggcggacttggtcggatatagatgtcgagggtgttggcggttgtggtgtgttgtctgcgtgggatggggcattgggcttccctgttcgaccattttcttttgaaggcgctgtggaattgctggtatatcgtcgttgatcggatcgtgatcggtgtttggtgtatggtacaggcggagaggttcggagggagagagatgttcccaggaacaagggtgtatagttgttaatgcatgatagttctggcattttctattagtacaggacagaagcattggacatacatcgtgacaacctacctccgagtgctgtccgagcagtcccatgcgcgggaaagacgagcttcatcccgtcggcctggaattgatggagctttgagaggcgctcaggggatcacgcagggcacaaagtcacagataataagactctgccaattcatgtctaaattgacagcaaaaaaagagagactcaaagagacatagggcaatatgaagtcatgcaaacatctaagttatgaaattcccgaaaagaacaggcccgcttacgtaacccgcgataatttctttgctatggcatcaacttcgcaacctccgcaacctccccgatagcattgcggccccgtcaacctccgccgacctcgacaatactccttgttatttgcatcggcatttccgaaacaacttatacaacatgtcaatgcacacctctctccgccgcacagcggtcacaatcaccaactcaacaaccaccatcctccctacaagactacccacgagcggcacaaccttcatctgctcgcaatgccgacacgccactctcctccgccgccccaagcgcccctacacctttacacagctcatcacgctttcggacggcagcaccttcacgcaccgcacgacctcgccggccccgatctaccgctccacgcgcgacacacgcaactccatcctctggaacccgtccagcagcaagctgatgaacgtcgaggaagacgaggctggtcgtctggcggctttccgtgcccgattcggccgcagctatgatgccagcgcggcgcctgctgcggcagcggaagaggaggtggctaaggactctcttgcggctaaggaccctgctcttgcgaagcgggccgaggccgaggcgaaggctgctgctaaggcggagcaggaggaggaggataacttgcttgatttgattagtgctttcgggcagaatgaggcgccgcctccgcctgagaagaaggttcctaagttcactaagaaatagtgggctttggatgtcccgggttgaatcaggttgttctgttttggactgcttggatgggagttgggatcttcttttgcttttttatgttttcttttcttttcctgtgtttttgatcttgtacaatatacatatgtctggtatgagcctgctgtattataccaagaattcatcttttctctcatccatgctatatttttgtcaagtctatactattaccatgggtcttgggagcacctgcccaggtggtccttatatactgtgactattcatacacagccgattatctctaacacagactaacacctgagtcttgttaacaaatgatacaatataaagtaaacacgcattagcattcatcaccccacctcagcagtatctcgcaaggtactcagctcgtgggcatgtggctgcttgatggagtggtctatggtaggtatcggtctagggccagaggaagatgtatgaattaggacagtataactgactagggtagataatgattttatttgccacaatacgcgaacagtggtattcgaagtgcagtggaaatagaagaaaaacacaaagatccccagcttgctgaggaccatcatcagttgcagcatggcataaacaaacatcgcgaaagggttgtcccataataaatacaaaagacgagatagaacggtgctaattccggggttgggaaacagcacccgagactgaggcatatcaagcgtcatcctcagcggccagtagccccgattcatctgtgggctctgccggagcgggtgcatcgctcacctcggggggtacataatacggaagtccttcctcgccagcatctagacgcagaaggaatgtctcccagagttcgatcaactgtatttagggttagctggatgaaaaaaaccaccaagacttggcgagaacttacctctttctgagcctcgactgcactttcaaggaatgtttccacgccagacttgaagtcctccactttctccttctcaaaccgttgtagttcgttccgcataagacgacccatatcttcgaagagcagccgcgtttggtgcactttgcgctctgcatctgcaacgtcggcgttgacttggtttaagcggtcttgctgagtctttccctggcggagtagcttgtcttggttattcttgcgcttctgtaggtcggactctgctgcgtgccaggtgtggaaagccttttgccgctgcgtgaaagccaacttgacacttccaattaaacggatatattcatcgatcgtgattccaagcgtcagaacatcctgctgcgcctgtcggtcataaagttcccgaatgcgcaactgaagttcggacaggccttccaatgggtaggaaagggcgggagacagctcgacggcggataaggcatgcaacgagctcgaaaagtcgcttgcggcctcggatagtccctttcgttgtataaccacagtatccattgatttcaatagagccttcagctggttctccaatgcatccaggtaaacttttcggtcgtggaaccactatttataggtgagcaggcgagaccgatgtatcagaaacgattcacttacatcgtcatgttccacgaatttagttcctccaccaacagaaataccaaaggagctcagcattcccttgcttgggccaatatcaggctctctgttttccttattcttaacatcaacggtgaaagcttcactttctaggaaaattttcaaatcgccgtcatgttgaagaataggatggccggcaatcttgttgagcattcgttccaaggcagctctcctcgactctacaaagttggtatcaaaccggccaactgcttgcttctcgggcggaggcgcaacgaccactcccgggttattgctgtgcagggagttgtagagccagaggaaatcacggtatcgacggctaacggtgaactcgggttggcgataggccttagaagttgtctagccataaagtactgtcagcctttccttttccactgtaaattttagtgtgtctaattacctttgtcgaaacttgatacacaatatgactgcttgtcagatctcccactttgtgcggatctccgacatagatatggaaagtcggcttcgcagcctgctccacgctcatgctaggctgcgtctgtcttttcggtccatccgcttgcaccggtggttgcacgggagggggtcctcggaagaccgcgctctcctcttccaaattggccgagtctgctgcctccactccagatgcctgggagggagatgaaagtggtcgtgcaccccgtccggcgaaaggctctttctggggcggtgctggtgcctcatctgtgggtgttggggtgtcctcgacgggcgcttctcccaatggaccgagagggtcgacggaatcatcgatggattctagtttagtggcttgtgcgttgatcttgcgcgtccctcgggggcctcgtcttcctggtgtttggacagcgggcgagctgtctgacgcgggggttgcagctgctgtgtggtagagtgcgcttagtgaaagttcgtggaaagagcggacaagccagataaaacataccaccttcttcggcgccgggcttggggccgtcgctgtgcttgaaccgcgaaggctcatctgcatcataaatcagagtgcgattcaaagagctgtggtatgatgattgcctaccgccccacggggaatctccagaatcgagatccattgctaccggtatgagatcaaagcgaagagaatgggacaacggcgagaagacgaatcaacaaattaagattaatgtcagttcaatcggagcttagagggtgcatggagttggagagggagctggttggagtggaggccgatccgcatccttagtcactcacgggatccgggcaaccttggaagacctggagtccaccccatgtggtgtttcgtcttcaactctttgccattggcactactctttgatctgggggctatttatttatgctcatgacgaatacaacccactggatgccagtacccgatactctctacacattttaatgtcccatgtctcaacacgtcacatcatttcaattggagcttcttaatgtcgggatgatctatccacgattcccccgctcaaatcaccatcggcatttaaaaggtcattagcaaccgcgcaatatctatttgacccacgggaggcccagcttgtgcatttccacagccagctggaagatgtaatccagactctcacactgagtcttcgccttggcagtgttatcaccccagacgtaactgcaggaggaaccaggataagtatacatcagtatcacatggagggaggttgctatcactcacattccgtgcctccggacaagaaccgcgtatgtgtccgggtacttgttcatggctgcctccaaaccactggtgaggtcctcttcgaaggcggtgttttcaataatgggaatcttcaaagtatcgaagaacccgagcatgccctttcctttaccgcggggaatacccttgatctgctcaatgttgctgatctcgaaacaagcatccgggcccttctcccgctccaccaacagagtgatcagaaccgcccattgcgaatgagtgtggatgcagcacccagcaccatgctcaaaggcagtcaggaatagtggggtacaggcggagggattaagcttgaggggtttgcggatgtagttgcggtccgaggcagggtacttgggggtcggccattggagcacgaagatgttgtgaggttgtatcaattccttctgaactccggacggagcgatgaagatgtgttcgccttggcggatcgatgtctacttttccatcagcggggcaccgttgaaattttttttgccttgcaagtataagcttacaccacctccggtgccggtaacccatccccagttgtagaatttgcgacagagctcggggataaggttggcggggtgttcggggtcatcagactggaccaagtggtcattgttcggcgcaacggtttgctctgaggtgcacatgatgggctgcgacatattagcattggttcaggtagatattcataaaggtggaagaggacctaagtttgcaagtaaccaaatttgttattgttctggtgagccacgaggtttccaaggtttgcgacgagagtgctgagtaaccaatacgtttggcctcgggagcgggggactacatattcagcacgccattttaaggaacagctcttctagaattgtacttgcagcttaatgttgatatcaaaacacttgcgatatttaaatgtaggaagcttaattgcatctccaatcaggtccttctcaattgctatcagtcggtgtttggtgttctctactaaaatgacaagtgtagtttaactattcatagtttggcgctagtcaaaatttgctaaacatgcttagtaatgtcgctgcacaattgcacataactaactaactagcaagacacgccaggtctgctgtcaccagaagacgtgctctaattcattttagcgtcggaatagacagactagcgtctagagtgctctgcttcctgttagggccacctttaggaattctttaagaatcctatagattccgcgacctatgaacggcttacaccatcaaggatcaataactgcgggtatttatacacctcctcacttattagcgttgggagggaaaaataggattgaatcaaataaaaatccaataaaaatcaataaatacatgactcgctattagcttgatgaacagcacataaaaccaataataacacatatactctccgagcaactatttgtgtccaatcactgtagaacaagatcgaaacccgtgtgtacacgccctagtcccgattggggagcttagggaagaggccacctggaccttccccccagtgttgccctttctataaaaccacatctcctcttttcttcacttggtgctgtgtgctccactttcattccttctacttgttgttcacaatatgcgctttaacactgcgttgacatctgctctggtctcctccgccagcctcatgggctacgcccatgcnnnnnnnnnnnnnnnnnnnnnnnnnnnnnnnnnnnnnnnnnnnnnnnnnnnnnnnnnnnnnnnnnnnnnnnnnnnnnnnnnnnnnnnnnnnnnnnnnnnnnnnnnnnnnnnnnnnnnnnnnnnnnnnnnnnnnnnnnnnnnnnnnnnnnnnnnnnnnnnnnnnnnnnnnnnnnnnnnnnnnnnnnnnnnnnnnnnnnnnnnnnnnnnnnnnnnnnnnnnnnnnnnnnnnnnnnnnnnnnnnnnnnnnnnnnnnnnnnnnnnnnnnnnnnnnnnnnnnnnnnnnnnnnnnnnnnnnnnnnnnnnnnnnnnnnnnnnnnnnnnnnnnnnnnnnnnnnnnnnnnnnnnnnnnnnccagggggaggaggagactgcggataccaccgtcattgaaaagcctaccttcactgtatgtatctgaaacgctccctcttcgctcactttgctaactcccgcaagcctactagccttaaagctcctttcctggagcaattcacagacgactgggagtctcggtggaagccttctcacgcaaagaaggatgacaagtctgaggatgagtgggcttacgttggtgaatgggcagttgaggagccctccgtcttcaagggtatcgagggagacaagggtctggtcgtgaagaacgctgctgcccaccatgccatctccgccaagttcccgaagaagattgacaacaagggcaagaccctggtggttcagtacgaggtcaagccgcaaagtgagttatgcctttctacatttgttcgagatcttatatgctgactggaattgtcctgtgttagactccctggtttgcggcggtgcctaccttaagcttctccaagagaacaagaagctccaccaggaggagttctccaacgccactccctatgtcatcatgttcggacctgacaagtgcggtgccactaataaggttcacttcatcttccgccacaagaaccccaagaccggcgagtacgaagagaagcacctcaagactcctcccgtggcccgcaccaacaaggtcacctccctctacaccctgatcgtcaaccccgatcagacctttgagatcctgatcaatggcgactctgccaagaagggtagcctcctcgaggacttcaaccctcccgtcaaccctgagaaggagattgatgatcccaaggactctaagcccgccgactgggtcgatgagattaagatcgccgaccccgaagccaccaagcccgccgactgggatgaagatgctcctttcgagatcctcgatgaggaggccacccagcccgccgactggctggaggatgagcccgagagtatccccgaccccgaggctgagaagcccgaggattgggatgacgaggaggatggagactggctcgctcccactgtccctaaccccaagtgtgccgaagtctctggctgtggcccttggacccgccctctgatcaagaaccccgagtacaagggcaagtgggaggcccctctcatcgacaaccctgcctacaagggtgtctgggccccccgtaagatcaagaaccccgcctactttgaggataagactccatccaaccttgagcccatgggcgctattggcttcgaaatctggaccatgcagaatgatattctgttcgacaacctctacattggtcactccattgaggatgctgagaagctccgccaggagaccttcgatgtcaagttccccatcgaggaggctgaggaggaggcttctaagcccaagcccgaggtcaagcaagaggataccactgtcaccttccaggaggatcctgttgcctttgtccgccagaaggtcaaccacttcgttgatctggccaaggaggaccccatcaacgctgtcaagaccctccctgaggtggctggtggcctgggtgcgctcctcttgactatgatcctcatcattgtgggtgccattggtgctagcagccctgccgccccgaccgagaagaagggcaatcagcccgccggtgctcccaaggagaagaaggaagaggctgtcacctcctccgctgagactagcaagggcggtgccaccaagcgcaccacccgatcctcggccgagtaagtgcgatgattgaaaacaattatacgcagaaaagaattttacccacccagcgaagagatttgcatttagttaccgcagtgatccctttcttgttgtgtcttggccgatgtttttggggtgaaggtccatgaaacattgaatggaggcccgatttgtatactcctgattatctctattatttctactcggtattcactttatttctttcttggaaccgccttgccttttcacagtgtcatgactatgacttagccctctccgatataggagacgtaaagtaaagcttgaaatgggaaatgccttcctaaatcgctatgatcccttgcctacaacgtctagtacgcacccgaaaaagaatagatgcaatcgataactgccccccagttagtgtcggcgatataagagccaatttgcaactcctcattggctgaaaccgccgaaaagctaccttatctgggggttcacattacaacgtggggaatacccgtggaccgcccttgtgactaaggcggtttccctcgggcctgggggtcggggtagccatagatatatcattcccgaggtcctggcacccccagatcgtcttcatatttctctttctacttaatctgtgacttgtccttttctctaattctactgcttttacctctctataattcatcatggctgcttgtcggtcaattgcccgttccatccccaccgtccgcgcagttccccgcacggtgtcggtaactgccagagctgcttcttccagatctctcactacttcttccctcgccagtctggtctcccgcagagtagccgtcccctcttcatcactctctgccactcgccgcttgcacgcaacagcgcagcgactcgtccaagcaacaacctcggccgtctccactgctactgaatacccaacaagccacgaaaagattgccaacccaattgacactgctaacttcattgacaatgagtttgtgtcatctaaggcatctaaatggattgatcttcatgatcctgccaccaacaatctggtcacccgtgtcccccagagcacagatgcggagctaaaggccgctgtggagtcggccgagaaggccttccccgcttggagggctaccagcatcatggccagacagcagattatcttcaagtttaccaacctcatccgtacccactgggaccgattggctgcgtccattactctcgaacagggtaagacttttgccgacgccaggggtgatgttctccgtggccttcaggttgccgagaccgcctgtggtatcaccacccagatgaccggtgaagtcttggaggtggccaaggatatggagacaagaagctaccgcgagccactcggtgtcgtggccgctatctgccccttcagtaagttgcccaccactttcaatccctccacatggatgctaattgttaccaagacttccctgccatgattcccctttggtgtattccggtcgctaccgtgactggtaactgcttggtcatgaagccatccgagcgggaccctggtgccgcgatgatcctggcagagcttgccaaggaggccggtttcccaccgggtgtcattaacatcatccacggtgccgcccccactgtggacttcatccttgatgagcctgctatcaaggctatcagctttgttggcagcaaccgtgctggcgaatatatctacgctcgtggttctgctaatggcaagcgcgtgcaagccaatctgggtgctaagaaccatgccgccgtcctacctgacgccaacaagaaccaggctcttaacgccattgtcggtgctgcatttggtgctgctggccagcgctgtatggcactgagcacctgtgttatggttgctgagactaaggaatggctgcctgagattgccgagcgggccaaggccctgatcgtggacggtggcttcgaggagggtgctgacctcggccctgtgatcagccccgagagcaagaagcgtattgaggacttgattgctagcgccgaggaagagggtgcaaccattcttctggatggccgtgggttcaagcccaagaactaccccaacggtaactttgtaagtcttactacagatactcatatatgtatctcaaactaattgtgcctccgcaggttggcccaaccattattaccaatgtcacccccgatatgaagtgctacaaggaggagatcttcggtcctgttctcgtgtgcctcaacgccgagacccttgacgacgccattgacgtgatcaacgccaacgaatacggcaacggtgccgccatcttcacccgctccggctcgaccgcctccaagttccagaaggagtgcgaggctggccagctcggtatcaacgtgccaattcccgtccctcttcccatgttctctttcaccggtaacaagaagagtattgccggtggcggtgccaacactttctacggcaagcccggcttgcagttctacactcagcagaagactgtgaccagcctttggaagagcgaggatgcgatcagcaccaaggctaacgtggttatgcccactcactcataaatatggtatatgcctcttgctttcttgcttttcctttagccggtcattcgcatgaaaaaaatttgtcttttcttgttaggcaaaacatacgccttatggatcccaatgaatgtatctgaattatatgcttttatgtcacgaaattcatgagtatgcacatggattgcagattgaacagtgtatgcagaattacaatcgcatactcgcttatgcggccttgcaaagtcattttggtagtcttttcagatgtgtttttttagatatacgtattctccacttctttagttttctaggcagacagcagaaaaggggaaaagcttagttttgcgcaaacgacttttccatgaagaaacgatctataaggttatagcatgtctatgatcaaactcacacttccctagtacgtactaccattaaactcattggccaggttgaaagctatattgacctatggtctatagaaaactaagaaactgaaagccctagaaaatacaaggctatactcaacacacgagcaagagcaagaacaagaccatcttactcggcaaccttacgctccttgaaagcgtaaacaagtctagcagaagcaaccttcccatccttaacgacaacaacacgacgagtatggcgtctctcgccatcaacaatctcaaatccccaaacctgctcagcagtccacccagactcgacattctgcacaaagctctgcaaaaacacgccctcgccctcctcggccaagaatccctcactcttcgacccatcaatgagagtctcgccaatcaggaacttcagcaccttagcgtcagcctcaggcgagccggccttagtctggacctcgaggacagggcgcacagcaccatcctcgctcttagtgccggcgatctggcgcgagcggcccttcagcttgccgaagatgtggtcgacgtgctcgcgctcttcccagtccagtcggcgctcttccttggtgccttggatgccgcctgtgattacttgctgcgcgtcgacgtggatgagcgcggggttctcgctgtctgcgtactgggtgatgtagattgtcactgtcgcgtatgagagagtcttgcgaatgagccagcccactccttgctgtttggattgttagtggggttgagttgttggatggggtttatgtatggtatggtatatgtagggcaggggataataatgattgtggttatgctgtgatttggattatgtattgtatgattggagtatcgtgacagggaatattgtgacaggggttgtgaaactcttggctgttatattcgagtaacccggaaggccggaaggttagggcttggagtgcataccagagataggatagggtctgtcgggttagaatgggttgagtcctgtgatacatgagtatgttgttatatggcttgttttatttaagcataccatctcccattttccattcaggttctgcatagtaatatcagcaggggcggccatcttgaaggttgatgtatagtatccggttgatgcgggtatggcggggggaagtggtaagcaatgaaaggacaatttggtcagtagaagaaaaattcgaacttcaaggggtaaaaagaagaaaatagaggaacttccaatgtcacctaatatatagttgtcttggttaagcaatggtcttcaagcatgtgtttattctcgaatccgaggctagaagtcacatgatctgatgactgtacatgtgattaaggagagctcggtgtttacatacttcgagagctacaatccaatcatgtcgttcaataagaaatatgccggtcttcctgatctagtgagaattcttggctgatatccacggggcttctactgactgtgaccaaggacccatccccagatatctatgaaacccccgacttgaccgatgaagcatccaccttgcccgtgagttcgccaattccacaccaaagagacgtcggcgggcccagtcactgatcctatctagactactactatccgcacagactccgaccatgatgacgcaggctcaaactccgatatcgaccgcgagggtgtcaaccccgaccaggcgcgtttgcacttcatgggcgcggccgtggacgcccgcgacgtcaatttctcagatagcatctccatgaaacggcaggcctaccggagcaagagcatcagccgccgccgtcgacgcagacgcgaggacggggtggaggaggttggtgacctgagtgatagcgaggacgagtcgcttgaccggaggcttgcgcggctacggagagaggtcgaagatctcaaggtggaaatgaccaacaaaaccgacagcccagatgctgaagctgaaaacccaggagagaacctaggtgatggcgttgcggagctaagccgcgctctggataatctgcacgcctcgcgaggtgcagcgagctcatcgcactcggctgcggctttgctgtctcagaagcttaggcctgagactcgccctgctacagacgtaaggagacaatcctcgggggatacaccaagggcagtgcaggcgccaactgcctcttcggcagggatcctctctcacgcagcagcatttgacagccgcctagcgcttcttgaaagctccctcggtgtctccagtacttccaatccattcatcgccgacggcatcaacgactcaacgtcgcgatcagtcctcccagctctggaccaactcacctcccgcctgtcagcactcaccggacttctcgtcggcacaagcccagcagccacgacaccaggagtgcccaatgccgcgccaggaatgacaaccccacacctggaagctctctccacgcgagtgcgaaagctgaccaccgatgccgaggcgctcaccgcagcccgcagaaaagccttcgaggccgcaaaggccgtccacaacgcccgtctagcaacttccgacgccgacgtcgttcccgcactagaagcatcgaccgacgacgaccatgccgccaagatccaagccctctacaccaccctcccaaccatccagtccctgcaccccctgctcccgagtgtcctcgagcgtctgcgctctctgcgcgcctgccacgccggcgcagcccatgccgcggactcgctcaacgagctggaaaagcgccatgccgagatggcctcggagatcgagcagtggcgtgaaggtctgacgaccgtcgaagagaagatgcagcagggcgaagctgctctccgctccaacgtggaaactgtcgagccatgggtgcgcgacttggagtctcgtctggcacgtctggaaggtcccgcggcagtctaatccatttcttgtctactttttttgatctgctctgcctggggcagaggtttgatgaataatacccagtttgcatgtacgtcgaatgttgagggcatattgtagttatcttcaattgtcaatatcggttctataccagatggccttcttttttatatgaaagactactatagtgttactgtagacagactagactgtataccaccatactaaacattagatccctccctcacccgcctcaacacctgaaccctcggtctcatcttaacctcaacccaccacccacgcaacaaagcactcctcatatactcgcgcagaccctcaaacaaaccaacagcacgcacaccagcaacagcaccgataacacggcgctcagcagttcccgtagcaggagtcccaggcttcaagatcgagacccccgcaaacgaatctaccacaagcaccctctcccagtccgaagcagggagcgcacgccggagactgctctcatcagcatccatgaacccggcctgatcacccgcctcgacaacaacataatcgaacggctcccagaacccactagtggctttcacagtcttgtcttcggttttgtcgtatacccaccccgacgaagggtgttgttgcacgaagcgcgttacgcccgtttggcaggcgaggttacctaagtagacattgatcggcgcgctgctcttctcagaacgcaagcccgtatcgtggaggacagagtgttgataatgcatggcgtcgagagcctgcccaccggggtaatttgccgcagacgcaggaaggagcacgagatttgacagacagaaggtggcgagtgtcgtaatggccagggcgcgtgtcgccagtcgggcgaaaacagagcgcgagcggtgcgtccagagatatgcggcgccgagggctgctactgccgtcagggaggggatgatgtagacgatgaagcgccattccttgtgtggctggaagctgtacagggcgacgaaggaaagcgccgggatgagaagtgccagggcgggggagcgcgtggcgggttggcgtagtgcgacggggatggcgaggaggtaggagaggggattggagaggaggcgggggagggaatttaggaagtagaaggaccatggctcggtaccccattcggaggactggcctgctaggacgttgaagcggaaggcttcgaactccggccagagggggaagcgttgccagaaggtgctgtcgagatagatggtgagggcgagcccggtggtgaggcctactaggcccgcgatgatggtgtgttggaggttgatccgtcttgttgctagcaggaagagagtctgggttccgactaggagggctaactcggagcggaagactacgcctgccgtggtgaggagcgcgagtgctaagccgcatttcttttggtctgatgttggacgagggcctgggagaagcagaaacattgctagtgttgtgatgctgaaggcgaacatgtttgataatggccttgaggcatagaatatcaagtggaactggcttgcttggagtaggatataccagatggctgttagctggccgaagctatggcgcaggcctcttgcatatattgctagggaggaggcattgagtaggcccaggatagctcgagctggatgtcggtgttagtttgcttgatgtatcgcactattatctatgccgtacctaatatctgtcggttgatcccctcattcaacaagatcacaggcttcgaaagcatcgcgagcgccatagcgccaagagcgctccggggaacagccccggggaaagagaaatggtcatagtcggtgcgattgagattcaggtcattaaagccatttggcaacccgttggccaaaatatcatgtacggcctggacgtggaacgactcctcgactttggtgtatggagcgacgaggagatgaaggaggatcaaggctgggaagagaagagcgagaatcgcatatgctataagaaccgttagcttgttagcttgtgttgttgtacagagcgaacgaactatatcccatggtgactgcatccgaggagtgtaaatccggagatctggcgcctcccgcacttcacctttaacatcttccccaacccgcaaagatgtttttcttcttcggccttgggaagctgttttacggtatgtacttgttattccaactctccagcttatgctaataacccgccctccagtcatcgtcctcatcatcaatgccatcgccgtcctctccgaggaccgcttcctagctcgcggtacgtccctcccagctacagcccgtctagaagaataaaacctaatgaataccggaaacatacagtcggaatgggtcgcacacaacccgagccaggcttcggcgcaacatacgatagcacaagcgtgaaagccaagtccgtcgacctgatcgccagtgtgcggaccgtaatgcgcagtacgtttcccaaccccgcgaccatacaaccccggtcctttatctcgaatctgagtgacagctttcaacctgaataagtcgcaagctgttctactcgataaccgagacgccagccacggcccgatgggatagatacatagctaacacatccgcgcatccagtaccccttatcgtcatcaacacagtcatcattgtctacgagctggtccttggttaaatttcgctttttcgctatttcctccacgcgccgaatgtcgaactcccgcatccgtcgcaacccagctgcatagtgacccagctgccctgccaaatctacatcactgttcactacgacttgacttgcgctgtgacctcccctccgatgagctattcggaatccgacactatatcattaatgacaaagagtgaaatggggcatgatccatgcacgagcgaggagcataccgagggcagaggggtggtactgaaaaaccgctgccaggcgtctacttcatgctgcgctgggttaaggcgttgtttgagatgacaggaacggtggtggcgtgcagcgaatagcccgtcttcccctcgagttcgttttgattacttctggcttgtaactatatacccaaaatgctagaattgcaatggacactgatcgcgacatggtttacgtgaatatgtgtaggggattgtaatagggaaccccttggctaacggggcccccctctgcctggttctgccttattttgccttacacagaaggcatcaattcaattctgccagagtcaagtgactacacgtcggttgggccatttctttacagaacagcaatattacgcgtatatcagcgaaaaatttatacaaatcacggccctcttaaattgagactttgtgggagatattcaacccgcaatgacagactcatatttcttattctgatcacctcatctgtgagcgaatcaacgttgagtcaccgaaaagcgcctacaatttcatccctagaaatcatggactttttcttctactgttgtgatggtaaaactcattacttagtcatctgtgtctgcatagttaactaactagttaactaactaaataattaactaaagaagcaaataattcatttcatccggttcagcgcagctcctcccgcctagagcgcagatcctcttgcgtggacatttgaatgacgcgctatcttgtgcgcagtttgtcttcgcatagggagttggatagaggagtgtgaaggaggagaaggaggaggaggaggaggaggaggaggaggaggagaaagtggcagagtcggcgtgagctccagatgttccgttggatcagattatattgtttactagatcattgaatttctctcctctctaaatagttatatatgcacaaatttgtcatactggatccatgtgattgaacagacagttcacgactattcgaaagaatgaatacaatactgcatcctcgtttaggcatcctccaagttcaagttgcttattgctaatagttaggtgtctttcaaagtgaattgagttccatacggagtcgggaacggtattctaccaacgccgtgtgacggacttggcttagggctaagcttagcgttcggactatctaatccaccccatgtctaacacctaactcatattgacaaaagaaaaaaaggagaaaccaaagcaagcttcatctagatcaaatacccccgcaaaggcgctgtcaccttgtaatcatcttccagaccaaccactagactaatcactccgtctggcctcaccaaagccagtgcacccacgcggggatccacgcctaataaagcatgccctgaagcatgaggttcttcgtagattcggtacttccactgcggcagcggtgctggcaaggcgtctagattgacctcgtagcggctgttggtatgcaccagaaacaggtccacgatgcaattccggttctgcgggttagtgtagaagatatcctcgaagcctcaggtctgactggacgcaccaaaacacgagagggccgacttgggcgacgccaggtagtctgtcagtgggcccaaacgaccctcttggatcgccgatccaacaaatgcaaacaagtgaaagcgtccattggaggggggttcgttgagcaagttggccgctattccgtcaagatggcgatagagatccaccggatacagtcgcttgccgggggttaatggctcgactgcttggcagtcgaccacgaagggtgcttcgcagggccgtgtcaaaggtcctggctggtactggtgaccaactccagaggtgaagccctgtgccttcttgtatgtatcctggaattgcgtatcctcacggaaatccttgcgcgagaacagatgcgagaactgaacatcaaagtcaatcagctcctttgccatctgccgtcgctccagagcataagtctccatcaggtttgcgtgggccctcccctgcagcaccaatgccagcttccatgttaggttgaaagcatcggccacgctagtgttcagcccctgagcagccgaggtgctgtgtgtatggcacgcatctcccataatgaacacgcgctttccgtcccagaactagtccacgatgcgctgttgcaggcagtattggctgatttagaggatctgatcgatctccatagtagctgccggcaatatcacgcactttctgccgtagcagatcttccagagccacatcgctgtatctggtgtgaccattcatggggtgagccttggggccctcctcggccatctggcggagatcgtcctcattaagcagggtgtacaccccgtttgtatccaacgaattggggatcaacatcatgcgccccttggcggatccggcagatggtagcgtcgcggcactgcctggtcagacagccgcaaaacccaattatctgaatcaacggttcctatcgccggcgtagttctggaaagttgctgtccaattgcatatcagccacacaccagacctcgccctggcttccatgcttctcccattcaatacctagcagctaacgggtcttgctgccagccccgtcggcacccaagagatatttggtgcgaatagtagagaggacattcgaatatccgtgcttgacaagaacatgcagaggatactaggggtcatcttcgacgtaagtgaaattgatcagctccacaggtcgatccacttgataaccatgcgcctgtagctcttcatcaaaggcccgctctgtctctcgctgtggcacgctcaggatccatgggaagggagtcgtggtttgaacctcctggccaacataggtgcaatcgagctgaccgagatcgttgttggcccaaaaagccatcccactgacgtgtttacccaggatgtccaggtggtgatggatgtttagagtctgcaggacttcctgggtgcgaggttggatacctggctcgcgtatgtcaatgccggcttttcttgtttttcacgacaaaaataagtaaactcacctcccgcatgcccagtctggatgcgccgagaatgcacgtcaatcactcgaacatcgatgttgtagcgagccagcgtcagtgcagccatgaaggcgacagggccagaacatcgcatttgctatcggagaccataatgtggggttggtgatggcgaaacttggaagacaataagttgcgagggcccatcgatttgataaatataaagattggcaaggcttcctatattatcacaaccctcccaacggacattcggaactggacgttttcgggcggattgtccccgcggatgtccgacatctggaccttctgatgccgtatttttcgccccttgtccggtgactgtctatatttcagagattttgcgagtcgagcccttgataaatggacgcacggggcagccagagctccattgggaatcatcctcccctattcgcttgccagggcggtgttgttgaacattgagttgctttctctacgatccgatactggggacggactaagtagcaggcatggatttcgacatgtggatggattccaatttaaatactcgtggatctatatttgtaagtgtctgtagctaccaaacaacatttgaaagaacatttgaaggccacatgcatataatctccaagcactaggagaattcaaatactgcgaactaagtgtaaagtgcatcgtgtctaccttctctacacactggatctaccagtcagcttgatcacttggcctaatacattggggagaagttagcaaagtcatccatgggcggggagattgaaatcatggcgaacataccattaatccattccccctcttccgaggcctaaaaacacacaacccgagcaacatcgagtggttgagctctgcgtcccagcgggtacaggctggcgatacccttatcaatctgctccataggcataccaggataaccattgggggcgtagtaccacgagttctcgagatacatgtcggtcagaatacctccaagggccaccgcgttgacggtcatcttcttaggaccacagtcagcaagcgaagctgcgagtaaaaccttcgacggcggccttggagccagcataaagagcgtgattcttaacacctgtcatgttggccgctacggacgagatcaggatcagacggcccccctcagagccgtacttcagagcatgctgggcgatgaagaactgggcgcgtgtgttcagcgcaaaggccttgtcatacaggtcctctgtcacatcctcctccgcggagaaggcttccatccccgagttggacatgacgatatcgatcttgctaaagtgctccaatgtttttttcaaacaactgcgtcacctccgacggcttggtcacatctgcttggatggcgatagcgcgtgggctgccgggcaaagcctgaatggcttcgataacgccctgtgctggcccagcggcgtgagcatagttgaccacgacataatgcaccgtgtgaggcgagctctttggcgatggacgcgccaaggcctcgaccggcaccggtgatcagggcgactttgccgtggagatcgaaggatgcgggcatggttggtactgtcaatatgtgtttctagagatgaaagcaattttgtgggatcaatgttttgctcgacctccagatttccatacatataaacaattactactcaatatcgagcccatcttccctccgattagtgtctatatccccaccgaggaatccgcccctaaatgcgccatcttccttgtcggaaaacgagccaatcatatgacactacccgatctcgacgaagctgtcctactttccgatgtctatcttttctagctatcgaatgtgacgatctgggaaggatcgcacttgccaaaccggcaggaacgacctacaccctcgtaccctcgctccttccagaatcagcaacaggattaagcgaggaaattgcgacttttgcattgaatgcaaacacaaggtataaaaggggaggaacaagtgcacagtagtttttctcttttcccttcttcccttgtacttagaatttggtttgcattgcactctttcttctggatcgaattggcacgtaacatcgaagcctttattcgacgagactagggtactcggagaatgacttctcaagaagtaattcgcgagttggatctaccttatagcgaggtaacctttcgaacgtttttaaaggttcatggccttcgtcgttacgttgctaagcgaaaaagtttttaagtgaacggaaccgacggcgtcgcctttaatttaatctcgaccactgagattagaccttcgaagattggataaggtcttttagactaactaatgaaacctaggtttcttctagttgtcataagagaacatatattacccacgagcggtttgagaacgaatgtatacacaaagacaggcttaaacaagttgcctggatgttctggggatcgattttctgggagaagaattgggggacaataaacgcagactggtatcaagggcatatatgccctttaatcaggcgtttggttcgtggccggggtgagagctatgttatacaagacggagcgccgtctcataaagcccgagcaacaaaagcattacttcggttaatgggtgctgttttgctagattggccggcgtactcacctgatcgaaaccccattgaatctctatgggatctaatgaaggattgattccagcgtaactatccacgttacgagcggaatctggatactatacggcgtatagtccaacaagcgtgggatgctattccaaatgagagggtgagtgagggtcattgagactattcctcagcgtatgcaggacgttattgatgctgagggggggacactgagtggtagagagagagagagagagagtcctggaattagaaaattagaaaagaagaaaaagtactgtactcggttgttaaaaaacaagaaaattactagcgtaaaagcagttgttgacgatgaagatgtgataaaaatgacttaattttgttagtggtttccgtacaaactatattgtaggtatctatgttgtaatctaccattatcctggcctggtcacgtggtagctagctactctatagtgacttgcacctcttacacattcagctataccttttcaacaaaacaaaatattctcatgaccatggactcacagaaagatactacatccataggcagtgacagctctaaggaaaaccacccaccgacaaaatcagcccagcaatcaccaacagataccgatgatgtggaccgagacaccgaaatctcattagaaaaaatcaaaagtgcagaccaggcactgagtgttatcgaagatagcggatttttcaaacagtcgctttattcgtttcttgtcttgacttccgtgactgaggaggtcggacacaacctacttcaacttctggatcaaaaacacccacacgtccgaaaaggcttcttccttcgcaaaaaagtacttaccctcaaaataccgagttttacccatgaggctccactcgcctggttcttcgatcagcttttacagtggaatttcaacggtcagcttacacaagttgaggtgcggcgcgtgagggtgatggcaagcccgcgagtaacggcgcaatttcctggctacgtcggcgatgagaaagagcctgatacatatatcactcccaggggcaaccccgcaactggtcatccaaccgtggtcatggaggttggcttcagccaaacctactcaagcctagtgcaggctgcgaaagtctggctagagggtgttggcccaactgtacgcaaggttatcctgatcaaattcttccggtgcaagagcggaatcgccggcacaatcgaactctggggccgggacaccacaggcaatgcgagaatggtctggagcaacaggatcttcccggttcgaggccccgtcgaacgacctatctacttgactcgagaagacatcttcgacggcgtggttgagccaggccgccagggcaccgatcgtcttgaccttgatctcacttctctccgcgacataatcgtcgagacggggttggatgccgtcgggctcattcctgcgccttgattttttttttttttttttttttttttttttttttttttttttttttttttttttttttttttttttttttttttttacgacatgctttcgcggaggtgttaggtgttagggagtaagtgggatatggtgatttgcagacctgtatcttgtattttttctcttattttttatccgcgccgatgaccggccttttaccatctttttaccatgcatggacgaccagaatgaacactgcatatacgcagaagtcaaaccaaaaaagagaaagattcgctcataacttgaaatgagatatgtaagaatagtttaaaacgcccaaatccgagagacccacgctcgccagcaaaagacaagacagcaagcagcaaacccaatacgcctcttttcgcaaacctgccaggtttcgatcctgtcagtgtagcttgtacatgatacaaggagcggcagtggtgaaaagcaatagcagcaagaaagaagaagaaaaaaatacagatcaaagagcaaagtacaatgggaagagcagaaaaggaaaggaaaggaaaagggatgttaaaaaaagaaccggatctgagatccaacagagtctagaaagacatggctgtggaaataccccggcggggatcgaggacctccacagaagaatggaagatggaggcgcagatcataagaacatgatagtacatccataaggaagctatgtgcagaagcaaaatttgcgctcatatgtgcaaggtgctaagatgatagggggtatctccgtgaaagtcgagctgaagacgtgagatgaaaaagaataagtgctgtctggaaacgaaaaaaaacactgattgtagttcatgccaccttcttgaaactgaaagatctccatcgaggggtatggccgggccgcgtgtggttggtgggttggtctttgaccaggtctttggctaggtctttggccaggggctccgaggtccggatgggttgtttgggttgcttagggtgggagatgggagggaaatgtctcggggaaacaggcgactggactggcggctctgtctcgagggatgcttctggcacggcttctgcaaggagcggcgctgtcgccatgtcagacatggagactcggggctctttctccttgctgagtcggtggctgaaacttcggctgcctcgtttcaaaaagccgaacccggtcgacttccttggtgatccattttcagcagcgaggtcggctgtgtcggctttgctggcctcgatggctcttctcaactcctctgcctctcgtcgctgcatttctcggttgtacatctcctgctctttctggcgatttctttcgttcttctccttctctttctctatcgcccgacgttctttccgtagttggtgatcactcttctttgggctcaatggggtggtttgttcgtcagggattggagggagaggcggttgaacggctcgcggcgaagctgcttggggctccgagggttcttctgggtaggtgtgcagttggggtgcggttgggattcggttgagaggagtgaagggggttgtgtgatcaggaggcacctgtgatgcactttgggcatgggcgagaggtggtgagaagggagacccattagccttgccggcctcgcttgtttcggctgccccggccatgggggcctgattctcttgcgcctgctcgcgcaggacagcctcgatagttgtctcttgatagaaaagaacataggcacatgcgagtccgggtcgatctccaaagaagttgcgcacgtaacttttgtcaactggttccacgagctcgtcgtcgaacagcagccagccacggtcttcggtcttgataatggcaacgtagtggccgtgatacggtcctccgccaatgtgcaccaccaccgcatacaattcgtaaagacggtctggatcctcggcatcgtccgtggtgttaaatagacgaagatggtagggatagacgacgcgatggaacagcttctgcagtcgctgcaagtcctctgtgtatttgaaacgcttcaaatgcaaagccagcacacgtggcaaacgtttgatcttcatccgcttttccgcttcttgcagtccgccgcagttgtcgcagtggaacttattccgctcacagagcatctcctcggccgagaactttctcagacaagaggtcacggacgaatgctgctcgagatccaccgataaatccaagaatacttcgtctcgctgcgacaccttttcacaggtgagacacttggtctcggacgtcagagtcccctcgaacagctcgtgaacccatctggtagtattgggcgatttcgaacccgtgctagatggcaccattcccaaggagtcggcacttgctgttggtggcagagccttgtcgatgaatgcctgcttcgtggcttccgtttccacattggcgacgacctcgttgaggagcaaattcaaaaactcatgcgcatcctggtgcatggcggtccggaacatctcgtgctcgcgacggagaatgtccaagaactgctgcgggcgaacgataccaatgcgtgcttggcttcctacgaccgattcgaagatgtccttgagcgaagtgaacaaggactccgacatcccataactggtcgcattgttcttggtttccaaaatcggcagggtctgaagtgccactttcttcttgtattccggcgactccttgtcctccggcttctggttgggatttgggggcacaccggcctggcgcgcggatggtggggacgaggccttttgtcgggcagccagcgcctcggcttcgaggtgggcatttgggttctggtaacgtaggttcttcgcgagggcagcctcgaggctgtccatgggtgtgcgttgtgggtagttgatgacggcttcgcggaagggcactgagtaatagagacattgcaggatggagttacagtaacaagtgtttccatactgaaagcgcggggggattgtggtcagtgccgttgcggtctcagcagactccggggaagtccgtgactcacattttccattccataaaacttgtcgctgccgtcgtcgcggatgggacccatgtcctgcagcctcttttccagaggggaaatctgcggtacctggaagtcttttttcacgggtggcgccgtggccggggggtttgaagcctgcgcaagtgaaagtcccagtcagtggcggtcccaatccgaatggtctcacggggaccgaagcatctgctgtgctaccaggttgagcgagcatggctgtgcggatgtatggtcactcaccccattcttggagcccttggagaagagcgccttcatgatggcttaatggtcggtcgcactctgcattgatgaggcacagtgtgtggggagtttagagatcacaattcgagatcggcatacgaagaagggggggggatgatggagaaggaaatgaagcgcgtccggggaaataaagtgattgtcgtttgatcacataaggtttctggggtccggtggaaatgagaggggcgggagaatgagagaaggcaccgagttacggggtaatgtgttaagggatattagggagaatagattagagatgtctgatccagcaagaccagagttaaagagaaagaaggcaagtaatgtgccaagtagcagagacaaggggagcactggaatggacccaatttattttattgtagtaacatacataagaaccagtaacatcataacaatacaatcacttcatctgcaaccgaatcgtccagaaaacacaactcatatcgcgacctaccccatccatcttagcctctctccacgtggagacctaaggcaggtactggtccaatcgccgaatttctgcctctagcaggtcctaagccggaatcgaagtctttaaagaggtacaacatcctctacggagtacggaggacaacctcaagtaaagaagaaacaccggatataccggagccccatcttatactcattggccacaacggtttcccccagcggagcagccctcctccccccacgtccatggatgagagactcctcgaccaagaactcctcggccgtgattggccaccagccaccgtcgctcacgggccatgtgtccgcccctcgcatggcgtcgccccaacagccaatggccgcctgtgtggtggggccacgaaaggtggcggtggacccggccccttccaaagttggattgttcccacggaatcttttcctgttccttacatgaaactcttttcgggggggaatcgtctagaccggaagcatcaacatctagattccattccgaggaataccttatgtcgaatgtgtccaggctaacgtcagcctatatcaatgggagtcggccccttgcgggggtccaataggcgcagcaataccaatccagtcattcctttggtaccacaccaacgcacgttcccgcgatggggcactctgttaatctggctaatctggcttcaacgtctgatcgaactcacatatgatctgcccacgccaatgggaggagcaattaaacgagcaccgacatacaatccgacggcactaagcctgtacagcacgtacatggcgggggtggcgacaattacctctttcaaggggctcaagaactaataataatataatgataaatcgcatgttcggccggcattaggagataggaaggctacggaggccgtagtgtatcagtctaatcaggcttgggctaaccagttacaacccggattaatatagttctgtcgcaaatgacgttatggactgtggagtagatcgattgagcgatttacctgcatgtcatagccctttcgacaatgtacaacacaacaatgtactatatacctaccgcatccaatatcaaattgtcacggtatgatgacatcggaatggacgtgccccaaagaggaaggagcataagccggaaggatttcgggtggcagcgtaatttgcagaggcagatccggggaagtccagaacttggctgtatacgcctcgacgcttaatatgtcttatgaccggtatgctttagagtctatatactagtaggcattggcaaggcagccaggtgatgtgagacatcagatcacagggacatttgatctcaaattcatacactccatagttatgtacatgccactattataccaaagagaccatcggataaacaaccccaaacagaataaaccggtgttatcacgtgatgaattgcgctctatatggcgtggttattgtatctttcacctatcatcgaccttagattacttcgagaaaaaactcagaaaggcaaaagacctggctcaattatgcagttatgcacttcaggttggacaaggggcaatcctcacctcggcggcgccagtgaggtctttgatatccttgaaaatatcaaatatacatgatgagttgattttgccctttcgtctgtcgccgcagttcaacatcccaaagacctctccgctgtgcgtataaacctgcaattgagagttgaagaagaatggaacggattgaaccaatccagtaggctcgtaagagaatggctacaagagaatatattagccatataataaatctccaatgaacagaatattatcttactcggttgccttcaaccttatcggctcgggacaatcttcatcaaggcccagtccatcatgatctcttgacctttcgcgttaatttgtgtccgattcaaatcgcttccagcaacaatatgtcccaagggtcattccaaataaaagcgtccacgattagtttcagacctgcaggactcctctcgaactctgcgcacctatcgacatgttagcagtgtccagcaatattcggtaataccacccacagattaaaatcgataagccacaggctgattgaccggcgagaaatgtcaaatcgatgtcctaggaagtaacttccattgtcgcgcatcgtcgtaaagggttggcgtagtgcttcaatgggcctgattggcgtagataatcccctataacgatagtgtggctagggcccagtctttgctcgaccaggtggtcttgccgggtattactctcagtcgcttcgtgaatttgcatgtaataaaggcgactgcgttgaagttgtgacgggaaactggcaaaccggtgacaaagtcaatgcatgacatccatacgtcctccttttgggttgcttccagcttcagaaatacttcggttttgtattcttcgatattatcatctatcgcggcgatagtatattggagacctctgaaagatggatgatcaactttcaatacctctggggcaatggtgttgagtgattccttgaatctgagggggctctattcccagcgcgaaagcgcggcctgcccaggtgtgctcctgtgatttgtaacatttgttgcgggcgctttccttctgggggccaaacggtgtggaagcaagttagactataggtgcgccattccgattcgttgggtaaccgtagctggataagaccacccaatgtggatgttccggtcgaattaccatggatacctatgctgacaccagggattccttcccgtccttcataaataggatatcaacgctagattcctgaaattgtaaaagtcaactccgaatgatctggcctgcggtatcaaaagacccggtggatgtcttgtcaacctccactattatagtcacagggttcagatgcctgtcggtattggtgccataccgccaacattcaataccagtccactcctggatattcagattcgccagaatagtatcgacaattgacctccatttggaatgaatggagtgggtctgttcaacggggaaacaatacagtccgtcgtaaaacttctcttcgataatctcaacagaggttccaggtaggaggggctccaaaccgtggtagatctgcttggcagcctgataccaaagatcaggttgcgggagatctggcatgaggacaagcagggttggaactggcataggttcagggtcaacctttgacgtgcggcccttcagaatgacattggagaattcgatctcgagatcatccaggacttttttttagcacgcacatggatctgcgctggatcgtgagtaaacgtgttctttgtcgtcgccgctgggagagaagttaaaattggcccacccgcacgatgagaagacttgagaaagccgctgtggtcaacatataaacctccaccaagtggagaggaagacgaggtagaagagaagctgagcgcgtgcgcactaccctactgaaggccgaagatacaactgaagattcagacattatgaatgtctagaggctgaagaaagcagatccgtaaggatacaagagtcgaggaactgtcaaagatgaagtaaagagttgaaggggtagagaagacttaaagagatacaaaaaatagtcaagaagagccagacaagaggtagacaagacagagagaagagagagaggaaaagtgcaaggtgaagtagaggagagtcaaggaagagacaaaggcaagagaggtccgaagcctaaacaggaaggagccttccaggtttacataattcacctgggctgccaccgagatcactagtatcaaattaattgaatgcaacccgtattgaatgctcgtgatggcttgattgtagaagttgaggtataagttgagatgctgcacctatcttcatctagatcaggtgatctctcaattcaactgcacctgtttggaaccgacgtgtccgggataaacccaatcgtttgtttcgcagcgttctttttttatgccgtccattcctgttccttcgcgctctgtacaacgagcaattgccaatcaattcggtcggtctccaatttctcgtctggctcattgcccgtccctgcagaatcgtcgagtcatcgcgaataaaaataatatccctgcccccaccatcccccaccaaataatttctccccgccgcactcgtcagttttcctcctcccatcgctccgccgaatcaagcacaatggggaaagaaaagggtaccaacttcaacctcaagaccccgaagggcaccaaggattggtccgggtccgatgccctcctccgagaccgcattttcaccaccatctcgaacgtcttcaagcgccacggcggtagcgcactggacacccccgtcttcgagctgcgcgagatcctggccggcaaatatggcgaggactcgaagctcatctacgatctgaaggaccagggtggcgagatctgctcgctgcgctacgacctgacagtgccgttcgcgcgctggctcgccatgaaccccgaggttcgcagcatcaagcgttaccacatcgccaaggtctaccgtcgtgaccagcccgccatcaacaagggccgcatgcgtgagttctaccagtgcgacttcgatatcgccggtactttcgacgccatggtgcccgatgccgagatcctgcgcatcgtcagcgaggtctttgaggagctgggctggagcggtcgctacaccatcaagctcaaccaccgcaagatcttagatggtgtctttgccgtctgtggtgtgcccgaggacaagctccggccgatctccagtgccgtcgataagttggacaagatgccgtgggcggacgtgcgtaaggaaatggtcgacgagaagggtcttgaccctgaggttgcggatcgtattgagaaatacgttatgaacaagggctcgcgggagctgctcgacactctcctggaggatgagaccctcaccgctaatgcctccgccaaggctggtctcgaggaaatggccttgatgatggactatctcaaggcatttaatgtactagacaaggtctccttcgacatgtctcttgcccgtggtctggactactacaccggtgtcatctacgaggttgtcaccgagggttcggccggtgtgcaggccgacgccccagaggcacaaaaggccgagaggtccggcaagaagagcaagtccaagcagcccaccgaggacgacgaccgatccaacgaccccaccctcggcgttggcagtgtcgcagcgggtggccgctacgataacctagtcggcatgttccagcccaaggcacagatcccctgtgtcggcatctcattcggtgtcgaccgtatcttctccatcaccaaggcacgtatcgagcgcgagcagaggactgatgcccttcgcagcagcgaggtcgacgcttacatcatggccttcggcggcaagggcttcggcggcttgttgaaggagcgcatggaaatctgccagaagctgtggagtgctggcatcaaggtagactttctatgaacattgattctgaacaaacactaacatcacttcaggctgagttctcctataaggtaaagcccaaacttccccagcagttcaaggccgccgaacaaggcgccatccccttcggcatcatcctcggcgaggacgagatggccgccggcaagtgccgcatcaaggagatgggtctgcctgaaggacaccccgagaaggagggtgtcgaggttgaaatcacctcgctgatttccgagctgcgggaccgtcttgcgaagaagaaccacggtcttgtctcatcgctggcgcagcagctgcagggcaccattgtttaggcgattaaacaattgggtctgcattttcatttcgtttttttctttagagcgtgtttttcagaggtttctctgttttccctactacgtagatctcttgcattgtcaggcttggagctcggcctatcaaaaaggactggggggttattgttgagaaaaaagaactatatttcagagatgggttgatgtctttaagaattaccaaatacccaattcattgcatttcccctgtgctttggtttgatacaggtttataatatggcacagcatacactatcagatcattcgagacgattcagcgtctcgaaaagacaaaggcacaacttagtataagaaatcttgcatataaaaggactagaagtacaatacacagagccatacatatacacaccacaacatcgaaactaatatccctccgcattcttcatcaagaacgacttaacaaaaggcaagcgatcaacgacgccgagtccaagactacgcgcccaagcaaccggcccttcaccaggaacattatacatcttatgcaggagatcgcaagcgccgccgatcttcgcattaggcaagtaccgctcagacgagtaccgctcaagagcaagcaaatcaccgatatccatgccatgcgagacagcatactggatcgtcttggagagcgacgcaacatccgcctggccgaggttcaggccctgaccagcgagggggtgaatgacgtgtgcggcgtcgccgacgagcgcaacgcgcggcgagacgtactgcgcggcgtgtcggaagcgcagcgggaaggaagcgactgttcctgtctgcacacctgttgctgggggagggacttgggctgggaggggggtgtgctggacgcgccaggcgagttcgtcttggtgggatggggtggaatcggaggaggaggattgcatgcccatcatgtaggtgaggtctgtcatgtcgagacggaaggcggcgttgaccatggcgaggaaggccggggtggggagggactttaggtaggctgcgtgctcgggggtcgttgaccagacgagggtggcgtggttgtttggcagcgggaggagggcgatggggccgccgagagcggggaggaagcgctggtaggctgtgcgcttggaggccgggaagggcgcggtggctggctcggcgagagcgagggttgcgacgatgccgtggcggccgtagtcccagccttgggtggggatgtcggcgaaggtgcggacggggctgttgataccgtctgcaccgacgaggaggcgggccgcgatgcgcttgggtggctctgtttccgcggcggggcctgtgggcttgacggtgacgatgggccaggctgagaggtcgggaccgtcgggtttgaggtctgagccgttctcgatggaggcgactgtcgagtttgagaagagggagaggttctcgtcacctgagtcggcgatgcggcggagcagggcgcgcaccaggttcgcgttctcggtcatggttgctacagtgcgcatgtcctcgaatggggatgtctccattgaccaatcgaatgatattcgggacccggtttggccgtcccagacctgcatgtcctggtattcctgcacgcgactaacatcgagcttatcgtaggcgccaatgctacgcaggaacgccacggtcgagggggtcaagctgctgcaccggttggagaactggttcggttcgaggtcccaggctttggctttgcggagatcttgggtctcaatgagggcgactttgagctttgaggtgataggtgatgctcctgtagtagcattgtatcagtatatgccctgcttatctgcgtatggtatacatacgaagtgcggccaatagccctaggcctgccggcccgcctccaacacaaaccacgtcatataggtcgggggaatccgatttagatgcaaattgccgccgaccggcggtaatgccatgccggcaggttgggcagacatacggccgaaggacagctctggagattggacgcatcgtgtttagtgattggaggttgaatcggatgatcgccctcaagatagacttgcagtgcaaacagtacaaacacctgcatacaaccccaggttatgtccacgctggttatggtaatgcttcttccttttttaatggctcttgataccatataaaagttcatttcatcgctattttacttcatctattgaatttacacgaatatatgaataaatgaagagttatgatggtattgcgggtatgaaacatagcgacagcaacaaatatgaactgctatatcagactcggtctggaaaatgaataaagcatgctgagacaaatacctaaatacctaaacgcttccgacagcagccgagtcagagtcatgttcaggctcagcttcgccttccatctctgctacgaaccgctcccacgtagaaagcacgccctgatagaactcgatgtgcgaatcggcaaaggagccaagtccgtctcggaactcgaccgccttgatacgttcgaaatccgcgacttcgcggatgacctcctcgtcaaacatctcggttgtggttttggcggactcgacctcgcgggtcaattcgtcaatacggagctcaagcttccgcacacgctcgcggcgggactgttcgtggtcaacgccgcgcatgtcctccattttagagcggatgaaagaggccggagaagaggtgagcggattagaggcgtagtaagcagctgggttggaagccagagaatcacgctcggtcaccgctttattgcggtaatcgaccaaggcctcgaaatcgagctgtttctgctcccgtgtcttcagcagggacttgagggacattatatacgattcggtatcgcgcagcgagcccaaatagttctggtcggtgtggtccttcagtccgcgcatcccgcgcgcggtctcttccactgaagctgcaaagacctgcagtggcatctcaacagcaggctctaacgggacaagtttgcggaactgcgtcgcgagctcggcatagtccgtctctaggtcggattcacgccgcgcaacccgtgccacgatcttctccacatgtgataggtcttcgtccagcttatcagccttctctcgcacctcgataaagcgccggtccggcttgtgcactttagagaaggcgttcacaaatgaatcagtaaagttatcaaagatcccagtggccgcgccatcggacccggtatttgttgatacccgtgttgaatgtaggcgcatatgcgcattccaatcgggcgattccaagaagatagtgagaagaggcgcccgccgaagcacaggatgaagcgtcaaacgtttcaaaaatcgatgcagcgaccaagctcgtcgcgttgtgaactccggtccaaaacgatctcctcgcacatactccatcttgtgtttgtcggggagcggcggcaccgcgcatgccgggtattcgcgatagagcgtcttgtataggaagtaaaagtcggtgaagcgccgtcgaaccgtaaaatcgggcttctggaatgatttgaagtcggtctatatatgtcagtcatagtcattttgaggatatacagatgtcgggaggtttaggcagcagttgcaccactccccgacaatgtatgcaaagaaaaaagcatacatgtgtggtaaccaggtacgagatatatgcgtcttttgtcccgtcattttctttgagcggagaatcaacctggcattcgagaacgccatcgccgatgcccgccaggtcgacggcgtcggctagcgggccggcctgaggctcttcttgggcggagctcattctccgcttgccattggtgtcgtgatgaggttcactgggttctccagaatctgtacctgcagttgtcggccgcgaggtatcgctgtctgggtcgtgcttccaagacacactgtcaaagtcgtcatgttgatccatcgtgggggtgtcggtcggccgtggtcaaccggctgatagttgttgaaaccccagtgatgccgataaatcaatatttgcaggaaatgtttgatcaaggagtgatagggactgaaagggctagagatgtggagtggagggggaggtggaggttggagctaagttcaatgatcgccgttccccaaggcggagttccagaagcggaacgtcatcatcgcaatgaatgtcaataagagttgcttgctgcttgctacttggtcctttcgctttcttatacttatattattattctaagattcatcgagattgcttcatctgatatttatttgtagtatacacaacacgcttttggattcctgtcaactggggatatacagacagacctaggatcccaacccgtctattcctaacgaacgatcctctcaattcaacaatcaagtcaacatagcaatcgacaacaccgaacaagatgcaaaatgactatcgacattatattaaggttttggtagatgggggccaccgtgagacgttccatctccattgtctttttccgggatattggccaacccatcgcgatacggctgatcatcatcatcatcactgaacatttcctcgtcactctccccagcaaatgcattatacagctcaccgccacgacgctgtgttcgaccagatgctccagtcatcggttgcatctcatcttcatcctcaatcatttcaaactcgtagtcatcgtgagcagtggtgcgacgacgcttgaccctctgcagctggaagtagacacccaatccaatgaagaaggtaacgatcatggccatggatgcataaatccaaatctgtgtacgcttcgaagcaccgaaagtgggaagccaagaggatatgtagcctgatccggcggacgaagcagagggcgtttcagcctcattgctagtagtactcgtgggcagcttcacatcttcaattggcgtggggtttgtggttgttggctttggctttggctttgcgttcacaggccggtcatgatggtcatccgggttaggagctggggtctttgttggggccgccgtaacactagtcgtggctacaggagcatcctcgtaaggatggtcgtcgtcgtggtcatcgggcagggggtggagctcttgtttagctccatcggcggcctcaccccacagattgagtcgccaatcaatgaatgcgccggtgaattcattgacattggagtctttcacgatgatggaccaatcgccaataggtgattcacccctaagaataaattagcaaagcgtatatcatggaattggcagcaacacataccaatgagcaacagacatgaaagtccaatcctcatacccaaccggcatgacatccttttcgcgggcaacactcagatagctgatgattccagcggggctgcgcagctcaacgctgatgtcgccgcggcgggtgtgattggcattcatagtcacagtgacatgttccaatttagcgaagttggcctctttcaattgatcagcagttaccgtatagtgactgagcagaccccgatcaccctgggggatctcttggtgcactcgcagccatggcgagttgaaccacgcttgaggcttcacgagatcccaagtcttagcaagctggaccatggtatatgtatcgacctttccgaaaccccagtcgtggctgaacttgcggccagagggcaggttctgccagctaccgtcgtcttcgctcacggggaccgccgtctccaccatcaagtactgtaaatcacgccaggtcagctccgggcgtgcactgagcgcgagcgccacgctgcctgcggccagcggaccagccgcagaggtgccaccatgtccagcggagcactctcttgcaccgacgtcggtagtgtgaatataagcaccggagccgctactgtatgcgaccacaagttgggccgagcatgactcggagtaaggcgggtgattcccttcccggtctatggcaccgactgtaatactgtagatactgttggtatacccatcgaagttgcagttgtccccgtaggacgcaccgttaccggcggcaaagacatagacagagcctttaccccctctgcccttttggataccgttgaccatggcgcgcttgatcaagattccaggcgcatccatagtagcaccatcgtcgataggcccccatgaacatgaatatatgtcattcttctggtaggcgtagttaatagccgccgcttcatcgacatcatcgataggcttggacaagatccgaatgccggctatcttgctatcgtacgcaacaccgactccacaaacgtcgttctttgccgccgcgatctcgccgcagcatcgagtaccatgcttatcgtcaagcagaagagggcggggttcggggaggccctcgttgaaatcccaggagccctctggaaggtagttaggcttgaggtcatagctatccatgtccagcccatcgtcgacaactgcagtggccacgcccttgccggttatcccctccaaccacagtcctgtcacattgagatcgtgtccgggctgttttgtgttgataagatgccattgttctttgaagatcgggtcagtgatccctagagttgacatggcatccttccggaaagcaacggcctgcgcatcttccctcttgtccagcgatttatatggtacggagaccggcggaagtcgtttctgcaatcgttgtctcgctggagcaatcttatgcgaccacaggatcttgtctaaggggtcatcacttgacccgattgcgccggagcgccgccggagctttcgcctggtccgtaaatcattcaacaaggtgtcaaactgaggggtctgttcccgcggtaatgaaaaagtgtggtggccatccagttggccaatctggccctcgtggcgtgcgcctaggatctgtgcgatgtgggaaggagaggtggtatcgtcgagctggagggcgaagaagtcgcgggtttcttgagagcgagggtgtaggttcgcggacaccgcaccagcaagacctagggtggcggtgatgccgctgacaatgcgcatgatgaggaatcaattgttttcgaggaaagggatcaagggcgggttatgaggttcgaggtatctagcgggtggttgccatggacagttccggaccgttgaatagcaacttgagagttgtggtaaggggtgtactccgtagggtggacagaaaggaaataagctttaacaagaccctatttccaaggttcacaatagttggtaagaggaggttgtaacagcaagacacaatgttccaggcgaaataggaggatcgtcagaggtcacccacgcgaagtcctattgagtctccggaacggtctattgagctcgacttagttgatttggacaagaagctttttctttattaactaccagagaacgttcggggcgttctaaggccacggtttccactctgttctccgtattgcgtgagatattattatttagttacttgtctagttcccagtggatgtccgggctctaatttagcttacgtataggcacagccttggcccgccaggcatacgtagatagctaactaacaacactatccttactccatactggaattcatgactcgattgcttgatatttggatgctacggggattacggtgtatttcatcaataattcatatcaactgcagcaatcgaatagctcaagtccttgcatgagcaacatagatctattggctttcctctttcactttaaatctactgccgccttatgctaggtataattgagtacgccctgcgatcacataatagcctgatcccggactgagatgtacccagttactagactcacttaaagcggcacctgaaataggataaaacagaacatcgaggtacttatgtctacatgtatggagtatatggatggatagatggattttatgtgaaatgatcatgttataactgtgaaacatcgattcccagtatccagatacttacgttctatatgttcgtactcgcaaataggtatgtgggtaaccatagtaccgagtccccataccaaatttaagaattatgcttaattctttatttccattctatggtatttcacttttgaatatctcatatttaccctaacgtcttggaatcccgcatgaatattgcttttccaaggatccaagccctcgataaagctttcgtatgacagtggccccgcgcgaaggctggggataaccagccaccgggttatcggatgtatagaccttgctggtttatttttggctggctggacttgattgaaatctttcacttcttttcatcacattctctgccatcccattgatacccctatcctagtgtttatccgccttatagacaggccaacttccctgtcaccgccgcgtggacctatacccccgcccaacttggtttgttgcctgcgaatcagctcgggccatggtgtggtgaccctgcgttaggcatcagatccagtcgcattgaatccgttccatctattccaagaaaaatttcgacaaaagtcaagtccggcaattttccctaaatctgttcgaattgccttcgggaccgacattagcgatattcgttgcagttgggtttgcaattgcacatacttggcgctctatctacgctttttccagtcatttccttgagtttgggcgcaaatacacgacatcatggctactatggcaatgcgtcaatcgcctgatatggcaaacggcagctctaacccccagatttccaatggagcgcaaagagctccagcaaggcgcaatcgtcaaaagactccttctgcggaaagctccgaatacgaggcggaatatgataacccgaagacggcccagaccagtgggagcgatggccttgcgccaggacagggagacaagtctttctcggccagggcccgaaaccagcccgaggcaaacctgaactatacaacccgcaagccgattcctccatcgacaccagagttatcagagaaatcgtccacaccgcgaggtctttccacagagccctatcacccagaacccagtgcaaaaatgcctgagatccaggtccagtcaccaccacctgcaccagttgtgtcttcgcccccgactcggtccaacaccacacgttcgatctccgccaatgactcgcggccagactgggcatcagagcgatcacctcttcaaaagttggaggtaaccttaactggaatcagcaaggaagagaagcgagcacgagtacaacaggcagaaatcaaagcccgagagcgacttgcgcgcaagaaagccgaacaagagaaagccgaattagcggcatcattagcacgcgaagcatcaacacaacgtgcgcagccagaaagcgaaccatcccccggcgcagccagacggaatgaacagagagatattccaattggggatcgaaaagaggacggcatgcgaaatggacacgcagctacaccaccacaacagcgacaaccaagcatagctgtgcgtcacaatcggacagtttcagcaaatccccaatatcaatataaccgccgccccgaagaaccccaatatacacgcgcagaagctgccatcccactctcagctaagataggcaatgtgcctaggcgatcagtcacagtgagcggacctgccgcgaaaccagcacctgccaacaatatcagccacagtcgatcgatgtctcaagcgggtcctcgacctatgaaggcttccggtgctctaagagcggagacaacagacgaaatgttaacaccacctcgtgcgcaagatagcgccgagtcgcaagtcaggcccaagaaacaatctaaacagtctgtgtctttcaatgtcccgccgcctacgcccccgccaatctttgaatggaggaatgcacagcctgctaggcttgcggcccttgacttcgatatccagaattttgatgtggagcgcagcaaagcgtggtgggcaggtgccagtaacgaagatcgtagaaagagcagggctcttcctaagaactacaaatctcctgctcagaagctgacaggtaaggtcctccgttttctagttttcaagctagattttttgtcaccgaaatgcatttactaacgcccactaggaatgactgagcacaaaaatttccaaccccagctattcttgcgatgtggacctttgctacgatacacaggtatccagcgagctaggcttgatagagccagcggccccattgaaaaggatatatggcgaggatctatcatgatagtgactaaagattcccgctcctcctacgacactccacccacactgagactattctctcaaccgatggatcttcttcctcctccacccgtggagatcagccatgaagatggaatgcaactggctcctgaatatgtcgacccaacagctgggctcatgaaagtcggccgtgatgggcggcccctttacgtgagaccagtggaacatgtcgaggaacaagtcgacctatcgtttgtagagaacgacgatggcatctacgagctctcacctagcatggtcgactatactagtgaaggcatcaaacagcctatgacttccactcggatgccttccgtcgacggtgagatggcgagtttgtaccgagacattcctggagcccgtctgtacgccgatgccgcaagagatgtaacgttctggcgattcaacctagaggttgaactgagcacaacgcaacagcgaatcgcctatcggatcaaccagggacccgccctgggattctgggtgcccccagctggagaatccatgaacattatgtttcacagcggcaacgggttcagcccctctgtggactctgatcgagtctgcgggcccgatccgctttggcgagatattctcaatgagcatcagactcgtccgttccatgtaatgatcggtggaggcgatcaaatcttcaacgactcgggtatcacagagtcgccgttcttccaagaatggcttaggatgaaaaacgcagccgagagatatggggcgtcattcactcgcgagttccgagctgaattagagcagttctatctcgaccactatgctgcatggttctctcagggcctcttctcgttggcgaactctcaaatccccatggtcaacatgtggaatgatcatgaaatatttgaaggctttggttcttaccacgatgatttcatgcggacttctgttatctctggaattggaaagattgctttcaagtattacctgctgttccagcaccacagtgtccccgatgaaattgaggcagatgaacccagctggcttcttggtgctcatcctggtccatatattgagcagaaaagccggaacctgtttatgtctcttggtcaaggggtttcattgttgggtcttgactgccgcactgaacgacgggtatgttactccaatcttccgacttatggactatgctgacatgttgcagagcaatgaggttctcagcgaagagacctgtgatttattatgggaccgctgccacagggagatcatgaatggagagacaaaacatttgatcgttctttcaagtgtccctgttgcttacccccgagtggtatgtattctgattgcttctgtctttgatcgaacctaaaactaacgtcgaacccaggcaatgctccgcaatttcatgaacagccgcaagtcacttggcaaggctggagtacttggcgggcttgtcaatcgatctggcccaaatgtggaggtctttgatgaccattgggctggcaagcacctcaagtctgaacgcacatggttgattgaggatctccaggatctggccgcagagaaatcagtccggatcacaatactcaggtaagaccagaaaagtcgcttaacggcaacccaaattctaaacgataaaaactaacgaaatccttcagtggtgatgtccatctcgctgcaatcgggcagttctattcgaatcccaaattgaatatcgccaaagaccacgattaccgatacatgccgaatgtcatttcatctgctattgcagacattccggagaccgatcttattgcggatatgatcaacaagcggagtacgctccaccacatggactcgaacaccgacgaggatgtcgtccccatctttttccaggatgtgaatggcaaggctcgaaacaacaaacgattactacctcggcgaaactggtgttcgatccgtgagtataagcccggatctactccacctgatacacctgagtcagagataatagaggccccggaacctcggccaaataagctgcagcggacgttgtcgctgggtcgtggagaccagggatctaccgggaagcctggtattctcaggcgcctttccacccgtggaccacctcctacgaggactatgagcttcaatcgtggcgatgaagctactttcaatcgacgtgcaagcttggatgggcctactcagccccacgagaacggagacagctatttcccagggaccggagccgcgccacctccacgacccggcagcttccaccggcgaccaacaaatctcagccaaaaagcggcaaggaaagcggcgaagatgggagataacggcgcaggcgcctacatcaacctcgagggcgggctcgccatcactttgaacctcgagatcagtccacaagacccatctggggtcaccgcaccctacaaactgctcgtcccagcactacactacaacggaaccgagtacgacccgcccccagcgcagattgtcaagggctggagaaagttcctaccccgccgcaaaaagaacggggaagcaggtggacggcccgaagcagatgattacagtgacgacgaacaagacgactacgaggactacgaccttatcaataatacccgcgctaacgctgccactagccaacaacatcaaccacagtacgagggatatcctgggagtgaagaggaggatggagattctgagggcgaagtccctcaacgtccaccacggcaggttatggctgaacaatcccccagtcctgaggagcatagccgtccgcgaaagaagaagtggttcggcgtaatctaatgtactatattgataccattgtgttcttgatgttggctgtgacattttctttttgcgatctgatgattctatggatttctatgagtacgatagtattttttgtttgatgtatgattcccctaatgcagcgaggttcaaactgatatgtgatgttcattctatcaagacattccgagtaaagctgaagtatacaaaaatcgtcggctctccggtgtcttattaagcgattcgggccggggtgatctgacgggattacatcagcggtctcgacctctcacgtgatatgtgcttagaaagccccggacgatgttcaacagactcagccctgatttgcctcggaattgctcgaaatcgccttaaatcgcctagtttaaacgaattatctctaatctcgggtggtctggaaaccccagaaaggcacagaatccaatcgcatcctgtctgaggacccagtctctctgatctcattgtcggtttatcaatcaacttcatcacctaatcctggtctccactgcccctccgaaaaaagacattatatctccccctcctgtccccttcccctccacttcccatacacaccttcaagctgttttcctccgcctttcgtcgttttccctcccttcgatccattggattgactgccgctgcggccactaccgtccaccaacagtctcctccttcggcctcggtcttcactaagtcgtttccgacgccgttgcgcgtcaatcctaacaccgccagaatggtgcactctaaagtagtcagtaagtagtctttggagtggatcgaatggtcctgatcatcttaatccctctgataccagagttctaacctcatatcccccacagttatcggctccggccctggtgctcacactgccgctatctatctttcacgcgcagagctccagccagtcctctacgagggcatgctcgccaacggcactgccgccggtggtcagctcacgaccaccactgacgtcgagaacttccccggattccccaacggcatcggcggcgccgagctgatggacaacatgcgcgcgcagtccgagcgcttcggcaccgagatcatcaccgagaccatctccaagcttgacctctcctcccggcccttcaagatgtggaccgagtggaacgacgacgagggcagcgagcccgtccgcaccgccgacgccgtcatcattgccacaggcgccaacgcccgccgtctgaacctccccggcgaggagaccttctggcagaacggagtcagtgcctgtgccgtctgcgacggcgccgtgcccattttccgcaacaagcccctctacgtcattggcggtggtgactccgccgccgaggaggctatgttcctggccaagtacggcagcagcgtgaccgttctcgttcgcagggacaagctgcgtgcctccaaggtcatggccgaccgtctccttgcccaccccaagtgcaaggtccgcttcaactccgtcgccactgagattatcggtgaggacaagcctaatggtctcatgacccacctccgagtcaaggacgttgtctccaacaaggaggaggttgttgatgccaacggtctcttctacgctgttggtcacgatcccgccaacgccctcgtcaagggccaggttgagctcgatgacgagggttatatcatcaccaagcccggcaccagcttcaccaacatcgagggtgtcttcgcctgcggtgatgttcaggataagcgttaccgccaggctatcaccagtgccggtatgttcagaccccggttcgtccattataagtttatctcgctaactcaattttctacaggatctggctgtgtcgccgccctagaggccgagaagttcctctctgagactgagtctctcgaggacgcaaagcccgtgctctaaatacatatatacacctcttcccacaccttcctctcccatttctcgttgtcatgatacatgaacacatgatgtttggcccgtgtatcgagcactcttcttgcttctagacttatattttaggcgatatctcatttctaaattccccgtgcatatttcgattgggttccttgcgtctttttctctctttcttgttccctttctgttgcccacgtctcatggaagaggaaaccaagtggtctttgtggttttacatcagttggtctgcttaggctgcttatacccttagaaatagaatagaagaaaagcgaggctcctatgtcatcctcgataaaaagaactcagaagggaatttcgttccttcccatcatacaagccttattaggaactctattcccatgcaccgggtagtctataagttacgagtttggaagctcttttatcagattctcttaaatgtctagataagcaagatcatttgaattaaaactgccgaattaaaactgccgtttatgatatgtatcaatatggctgaaacgatactcatcacaaaagtctctccagagacaaattaccctcttcccttaaccgccgtctacgcagataacccacctaacgccgtaaaaaacgaatgagtcctcatttctcagacttcacaggcacagcagctgtgaatgcagtagcaagcacaggcaccgatgactcattttcagcaaggtagtccggcataacccaatcagcaaacggattctccgcgcaccagcgatccttgacgacaaaggtctttcgctcccactcggcaatgtcgaccttccacttatcccacgcctcggcattagctcggcggttaacctccgtctggtcgaggtagggctttttatcggctggcgttgcagtgcgccacatctggcctagcgcagcgcggatttcgtcgcgcggagccttggcgttggggttgttggatgctgcgcggcggacttcgtcgcattggtcgcggcagcgcgcccagtagtccttttggtagaagaggaaagggtttaggcctgattttgcggggcgtggtggtgcggaaccgagctcggcgtagatggttgtccagagggcttggtcgtaggcgtcgcggcgggacttttcggttgaggttggtttgcgggaggtggaggttgaggggggctttggtgggttgatggttgggcttgaggtggaggagagggatgagctgcctcttgttcttttcttgatggttgagccgtttggcgtggaggatttgcttcgggttacttttgacttttccgggacaagtgggtgaggcattgtgatggggccggatatcggctcgattatttctgatgctgcgcgaaggcctgagaggtatgctccgtggacggttgctgggtgagtgccgcaggtggcttcaccggcgaaatggaggtttccgattggccgggccatcaggtcgtagtcgtctgggaaggctgctgcggccacgtaggagtagctgccatatgtgaatgggtcctggccccaacgggtgatgatggtctctagaggaccgggaactttagtgtctttgaagacgtttcgaagttggccagtgacctccgtaattatttcttcgtctgatgtagattctgcttggtgggctgcgtcaccagccatgagggcaattaagcatgggagtccggtagtcttcatgacattccagaacagatagaatcgaccgcggtttgccgcgtaatcttcttgaaccatagaagcagcgttattcggctcacggagtaggccaaacatatctcgcttggtgtcccagaacggctcttcgaacactaaaatgaccttgttcattattccgaaccccagtcggtcaattgcgccacgcttccagtccggaagaggaggctcgaacttgattttctgctgcttcaggacaccgagggaaccggtgaaaacgacatgatctgccaggaacttttctccaccctcgcactggacaactgccttctgtttcttgttggacccagtcgtatcgtaagagatctcggtcacaatcttgccggtacggacatcgagcttttctggcagcatatacagcccgtagggtaattgctggtagccaccaatgacctgggaatgttcaccctcgaactcgtttccgatgtcctggtcccatcccgacaggctaagtctgttcacgttggatgcattcgcgtactcgagattggcgaaatgccaattcatcaaccgcatatccttggttgtcaccggaagcatgttttgatattgtttgacaccctcgtccataactgcaccgagagtctgcgcctgggatgccatggcaatctcgtccagttcaatggtgtcattgactgtgtatcctgggttaagcttccatccagttgcctggcaggtcaaggctgccgggtcatcttccgaatttcccgctagatcgctcgccacatcgacggatggttcattttcggcagtcttgtgctttattccccgtctaactcgctttgtggggaccaataaatctattgtcccagctgccctcgcctcttcatactgtcgcacagtaagtccgtcatccaccgctgattcgcggccagtgtcaatcaactcgcggtttccctgggcggttggcacaatctgagctttgtgacgatagaatccggttcggtcgagcaaatcattgtacagcttttctgccatcgcgtcctgaacctcattcacgggcgatccatcgatatcgtaaatcgtcgaaacatcccgtatcttgtgatagtgaagtgccagctggccacgaactatctggtctagcgggttgccatgatcgaagccgacaatgatctgagcacccatttctgcctttgggacaagcccatcaggcagggtttccgacttgagactgtgcaacgggtgtgaataaatgcgtccaccgactcttcgacgtccctcgagaacaacgactcggggcatggcatttgaatcacggtactggcggaaaagactctccagttgacgtgcacaccccagaccagccattccagcaccgattacaacaattgtaggtccttcttttcgtcttccgcgtttgggtttcactggggccaatggagcctccacgcagccgtgattgatgtagccatttcgcgcgagccagtcgtaagcaaacgaagccagattcatccatcggtaatctttggcacatccgagtgcttcttccctgctgacagctaccatgggatttctcccccagagaagcagtattccatttcgtatgttgaggtagattgtgacgtgaacgtggcaaagatggtcttgcagaaattcttgttcttgtcgatgaagagcatacgggttcagccgtgatgcatacgccgctccaacacactgctcgccgtaaacagaggggtgaattttagatgggatggacgatctcggtcgacatttggacagatcaactttcccactctccaaaacattcggtccaaagacaactgaaggcatagaaagagactgtacgggcttgggtggaggtgatgtagatgcttttagctcaaaggaagatgtcaagtcagttgaggttgtcgactcattcggagtaccgctactgccactggcatacagtctctccgttgtgccaacaatgtgggatccatcagacaggaagctatgcgacttggcgttgttgttccctagatttcccaaggcaattgatgccgaagccgcttcatatgccttgtgcgtgatgcgtagtcgcttcgcaggaggttcagatatttcggtcggttcagatagaagatttccttgaccttgtaacgtgatctcgtgatttggaacatattgattcatgtatgaatcttgacctgggggaattccggcctggaatctcatggacgttgcgccatacatgttgatagcgagtatctgcagacaaatcctcaaaggagggtgttgatgatgatagaaaaagaaaagaaagacacttccacgtgcaagaagacgtagttatggactcgaagatgtgatgtcgacagtccttctaccccgagagtgtgtggatatcaaatatgcaggcgttcgcccatgacatggtcataggaattcgagctgtggcaagccgaaggaacacagtctgaatgaatggatcaactgtattatgttagatgagatgtgatatggttcaaaatgaccagggtatgagagagtagaccgaggcagcacggatatcaggacatacatcgagttcatcccccacaaaaaaccctcccaaagaattgagaataaggcccatcaaacagggcacgaatattgttttggaacaaactaaacgaattgtaattgtaattggattgcgaaacttgaggaagagacagtgagaggaccagagtagaaaaacccttgtggcttgattcctcggagcggggcgtatttctcagtccggcaggttgcggcacccaagttcgtcaacgtccaagggctgcgctctctatgttcttcactttaggatcaatccaggggctacttgattttcatttggttatctaggtttcaacatgagtgtgcagaccataggcaccatcctcccctgcgaacccgtccgagtcattatcggtgaactcatcgtgatatgatctcctgttcgagttttcccagcccggctggtcattgtcactgtcgtcacccaaaatcaggtcaacattgtcgtcgtccagatcagtgaatcccattcgctcttcttcgtctctcgcaattgtgagagaggctttgtttacatcaggatcttctgaaaacccatgatgagggcggtgcgctgcatgatcagcttgaagcgaatctcggatatctgcacgctcttgggcttcgagctcctttgcgcgggccaaagttctaaaaaatagagaagagaaggatcagcatgagtgcacaaaatatttacgaccgatgaatttggggctcaaacctttggtatatataccacccggtgaagattccaataccgattgtaaggataatactgcagatattcacggccttggatcccgcactcatctcctcgcccttttcggagagcagacgtatccgactaccgatgaacgcaggaaccaacaatttgggagagatgatggctgtggcaagtccgtacatcaacggctgcaccgtaggaaatgtggacacagctccgttgcagatcgagtagggcagcgggcataaacggatcatacaaagaagtttgaggccatcatatttcaatgtcagggccaatgcggcgaatcgcttgtcatgttccataagacgtttgacgaatccagacagaattgtccgcgaaacataaaacgagacagtcgagccaagaattgttgcggaagcgtaaatcaaccatctatagaagaaatctcgagttagcaatatattcacttttttttttgataagagcaacatgaatcagtctcttaccctttccatataccaaatataaaaccagccacagtcccaaatgttgaccaacccacaagaggtggaaatgagacaaaaaagacacatagccacaggatcaaggcggcgagccaggatgtttcccacgtctcagcgaccgggccaagccagatgaacagcttccccgttaacaccaagaacgcgatcccggatagacccaggaatatagcagcgaagcaagccccgatttttttccatagactcatcccctcccatatcttattcatacggacatataactctgtgccgcgctggattatctgttcgcgatagcttgcaccctgcccgctcgatctgccggtgtttagcctaccggcgcgactccagggcggatgaacatcactatcaggagaagaaggtatagggatcgggggagatggtgagagagatagcgccctggcggtggacaggtagtccgcgggcattgtgaaatgtataatcctggggtatcaatgctcggcagaggatggtcgaatccggggaagatgaaccactgtaaaacagggaccgacaggaagtgcgataccagggtcgatagaatatccaaagaagtttcaagggcgtgtcaaggccctgatagttggaccggacatggaggatgagccaagcacttttaggctgaaaatcaatttgactctgtcagcggatcccgccggacttgagctcgggtggtgattgatctacatgttgtctatgttgtagggctatcgttcagttattttgtgctatttatactataagatacatatctaactctattttgtagttatgtctttgtatctatctatgtccatatcagggattgttgattctgtaagagtgtagttagcccctaggtatgtgaagcttgttattttatctacctatctctgtaatgctatatttcctttagcactcacatatcttatccttactatattattgtgttgttatattacccaaacaggccgactggaggtagttggagctaagtcgataagctgttgtgccccagtgttgatctccttctccgcctcccccctctttgtcacttcaccctttattcaactctcattcacaaacgtcggtcggcggcgatgcgatgtaattatctgcttgtcatctatcactctcgcaactctcatcaccttgagctataaccttgaaatcaaccttggaacccctgttgttcttcactttcttttcccatcacctggcatagacagaaagcatgaggtacctctgattctcgactcgtcttactttcgtcaagcatattcgtgcctatacctctaggcttcggacatccttttaagacccaatcccttcaacgctaaggtgttttcccgcttatcccggtccctttcctctacacgtattacacatatcggaatacaccatggtttccgacgagcttcttgaagaatgcctccagatcctgcaggatcaggcactggatgaggaggaacaggtggagaaggtggaggacttcttgcgtgccaatacatcattggcagggacacccttggagaatgcggtgctggacatcctctggcgccatcgcaatcgaaacttgccagacgcatcacctccagtccgtcatactgtgattcgccgctcatcgcctgcgccatggcagatggctcgatcatctacaccgctatcccctcattcaactttggggacaagccctggaagtacctcgtggatgcaaagctcccgtgggccgttctcgcggcctccgctatcttctactgcctccccatttgggtctccacgcccatcgccccggctcgcccttgcacaacctatccctcattccccaaatctgaatgcctacgagttctcggaccaaagccagatctctgactactatggagaccttgggggcgataacaatgttgactggctagtcgcagatgatgccaacagtacaacctcatccacgggtggtgtcagcactcccggggcactcagcgccactgcagttgaatttgttccggatatgagcccacatgatatcctgcgcacggtgctgggtgacaagcgatcaaacgatgaaatagaagctgcactggaggctaacagttatgatctcggtgccaccatcgcttcgttctcgcaggatatagaatccgaggcgatctcaaagcaacacgatgacggtcgtgtcttggttggcaagtctatgacaatagaacaaatacgcccggtcacaccattgggtagcagtcgcagccccgtggtctgtaagtactggctatccacgggacaatgccttcgagcggattgccgtttcagccatgacctaaacacacatgtgtgcaagtgagtgttttttgaaatctgggtaagtcaatcgttctagcgctaactattgtgaacaggtactgggttatgggaaattgtctagctggcgatggatgtcccttctcgcacgatccttcggcgcttatcggaaatctcagtgtcacggatagtagtcgaccagcttcgccctccccgttccaggtagacagtggttctgacgcattcccacccctgcaagtggcagataacggtgatcaatgggcaaatcaatacacgggccgataccctggccatctttctgcttatcaacccagcaaatatgcgcctcctggcctccatcctggaatgggcaaaagaagtggaagtgcaactcatctcggacgccccagctcccgtccatcaagccgtcaccagaatcgggagttgaatcctgctgcaccgtctgtagacgatccagatgccttcccaactcttgccgcagtcaatgctaagaatgctgggaaaaagcatcatgggaaacggggcggccataacaaccgcgaaactggctcaggaaaagaaaataccccttcgtctctggcggatgtggttcgaatgaccccatctcctgtccccgggaaaaccaaatctggctccagaaacaaagatacgaagggtcgcgagaacagtgccgcagctcagtcgattccacccccgcaaaatattccgtggttagagacaggctcgcgggcgaatcaacaatatatcaaatatcggacagaggctattcgccacggtactgtgcgaaacaagttcctccagaggtaagctttcagcgagtaatatgatccccactccttctaacgatatatctcccagcgctgcccaagcatggaaccgcaacgatgcccgagctgccaaagcattgtcgttacgcggtcaggccgagaacgacgcgatgcgcaggtgtcatcgggaggctgcacgccagctctacgaagaacgtaatcagcatctctctcacaagggattggatgaatcctcagaagagctttacgttgaccttcacggtctccacccagaagaggctatcgaatatctcgagaagatcctgctcaagcatgctcgagaaggcctccgggtggtgtatgccatcacaggcactggtcaccactcgaagaacggcaaagataaaatcggcaaggccgttaaagcatggctgaacgagtggcggtacttgtttcgggaattcagtgtacctggtgagcgaggaggttatgtcggagggattctcggcatcgatccaaccagttatgacaagtcagtagccaaggagctggctagcgaattgatggaggccaacgctggcggagagcctcccatcctaaccctgggcaaaatccagttactcaagcgcgaagaaatagagactcaagatcaatgacctggcgtgtcattcaactcaagataccccagtaccaatctatctattgaatctaagttgtatagaaaagtcgtctgcacaaattgagccttttcgcccaaatttgtgactcaaccacaagacgcagcagatgcatcaagcgaacacgtcgggttcttcaagcaatatttttaggacagattcttcctggctgcatgcttctatatactagcaaggctacggaatacaatacacagtagaaaaaggctcttctccagtagatgcactcatataacatactagaaggtacaaggaacatgcaaggatatatgcctagataatacacagcgctacatatataaatcatctactctggttcctgatgctgccactccttcctcaaagcatcaacatcaaccccacaagcctcagcctttttgacaatagccctagccttattggcaacaggaacatcaatcatcttcccatcaagagtccaagcacccctccccgccctcgcagccttatcatccgcaataacaacccgcatagcccactcagtctcatgcggatctggcccaaagatctgatccgcaaccttcacttgcgaaggatgaatacactgcttcccattgaaccccaaccggcgcccatccagacactcttcctgtagcacagctggcggcgacccatcccccttctcagacctgtacgccgtgcagacaaggtcaatcgttgacggtagctccgccgcccgcgcagcggtggctatcgcacatcgcgcgaacagaaactctgtgagcgagggcgtccgcgtgatgctcaggtctagggcgaagtcttcggctgcgaagattaagccttggagcaagggcgaagcagtgcagatctgggataggtttgtcagggacttggcggactcgactagagccaggagtgagattggggttcttgttccttctgttggtggttgctgggatagagtgtgggttatgacgtctgtgacgaatgttaggtcggaggcagagttgacttttgggattacgattgttgttaggtttggtgattggagctgggacggttagcaagttgaatgttaccagggtggtggaagggggtgggagctatgtgtgtgtgtgtgtgtgtgttctggagtccactcacgacttcggtcaaatcacccaatgcgagtccgctgtctacggaattgattcgcacggcgcgttcccggattcctggtggcgcggcttggtcaattgctctccgcactagcgagcgcgcctctgctttcatgtgcggagtcacgctgtcttccaggtcgtaggtgacgcagtcggcggtcagtgagcgcgacttatctagaaagcgttgggaggagccggggactgttgggcgttgttggttagctctggggtttttcttttggagttcggggtgaaatgcggggaagacctcgggatgcgatgcggctttggaagagagctcgagcttaccgtagaggagggaacgacgcagagtatttcgggctgccattgtcgatatggtgatttgtgtgtgtatccaatgatatagagttgtgtactgttattcttggagagtggaggttgaggtctttatggggttgactcgggaagaagccgactcggttatccgtaaagccgctttgggagaaggttagcaaagttgttttctccttatatttctttttcatgacctgatacaacttatgagatgtctggtagtagctcttcttactatgctaacaagcagttcatttaaatcagagaactcaggcataagtactctgtagcgaagctcgatttagatatatatacttgcaagtaaacgtattttctgtatattccagatttcaacttcgtgtcattaggtgtccaagtcccattcatctagcgctgtatttctagagtatatcgcaggcagcatccaacaaacatataacgctagtattacacaaatgtgctgaacatcagaggtactctagaaaaaggagtctggagcggatgcacacaacaaagatcaattcacctttgaagaataccatattaaggaggaggaacatattgtaggtgagatcaaagagtcactagtgagtgccaccaaaacataattatagtaaaatgttttcctaactctcgcctataataaggtaatctagatggtacttgaatcacccgaaaactactacatacatacttatgtacttcatactctgcatgtatgggtattgctatgtgccttttgaactactttggcctccttgtgattttgatgcagaggttctatactccgtatagatcagtgtcttatcggtttagcgccacatacgttggacataacgtgtggctgactggtatccactcagcatagtcacgtgaatacctttagaaattgtcccgaagcaggagtaatgatcggatcttcttatagatcttctttaacaattctaaaataacttcacagtatgctaggatagatcatgcagctctagctaagtaaatatcacacatcatcaacgaatatacttaaggttggtctatgcttccgattattctgccatcagaaaccgcctatacccgtgtttcgaccacatagggaacatcgccggtcaacaacaggcttaacttggattaaattgacccaatctgctgaccgagaggtcctttacattcataccatatcaaacccctgccctgtgaatcatggaccaaggacaaggaggccaaggcgagctcaactggcgcctcagcgcgcacccgatcacgctacttgtcttcttaagtattcggatcggtccgtattcccccaccccgagtaaaagcagcaagaatgatttggctaacttcatgattaggcgcgctactgatgtatctatttggtgtactcttcatcaacaacttgtacggaacctgcgaactacccgcctgtcaacctgcgatgctaacgttcatgtagtatcctcgtcttcattttcacccttctcctcctctccgcggatttctattacctcaaaaacatcgcgggacgccggctggtcggcctacgttggtggaacgaggtcgacacctcaaccggcgactcacagtgggtcttcgaatcagccgaccctaacgttcgcactataaccgccaccgacaagcggttcttctggctgagcttatatgtcacaccagctctgtgggtagcccttgccatattggctattgtgagacttgtcggtgtcatttggcttagtttgattggtaagttactcccaagatactttgatatatgccggcagtagatattgactttggtttagttattgcactcatcttgactatcacgaataccatggccttctctcgctgtgataaatttggtcaggcctcgacatatgccaactcggctctgggtggtggtattgtgaacaacatcgctggtggcctgctgggcaggctattccggtaatggtaggcaggttgatgcctgtcttgccgttagtggccctacattgtcatccctcttgtatgtgctctgtatttctagcaggatatttgaccacttagcattcaaatgcatcaatttctttcaaaatatggtctcatttgtagctctaatgtgattgaaaacccggtctaatgtaagtgctttatctctagagccgttgcctcaggtaggtcaacgcatcactctttcctcaaacacgcagtttccaccgcagcggcacctgccgattgccctttgttttccttttcctcctcttccctcttcatctccctcttcttcttcctcttcctcttctccattgacttcaatcatcgtcaacaaacagcctttgcgtctactgcgcttcaaaccccacgttggtaagtgtcgttcttagtgttgaccttgcaccatctctctcgatgaccctaggagagcgaatcagatgaaaatatcgtgcttcaattcttttatgtgtcttgtcccatctgcctttgccttctctcacccctccctagccctccatccatccattttttaacttacgcgctcctaaccattaccccagtgaaggatacttcacgacgacagactgttctggggaatttgactaacgagcctgtgtatcaagttgaccaaaatggagacaaatatccatgaagaccggaatgaagattttacctgcggacagtgagttctcccctccaaaattctagctttcaaggcttaggatatccccccgagaaaatcagtcacttaaaaattctagatgcggtggatctggccatatgactcgtcagtgcccgaatgcctctcttcctctgagacagagagacagcaatgcagggtaagttggtcctacactttccatgtcacattctgccagtccatctaaccaatgctaagatatagtgatgcctatggcaactacggcaacgacaatggtggaggacatggtgattactccggtggtggcggtgaccgcgcttgctacaactgcggccaagaagggtaagtcgttgatatctgtgtacttgccaaattttactgacaacaatgcagccatagcaaagccgactgtaccgagcctcgcaagatgggggcatgcttcaactgtggccaggacgggtgagttattattgaacatcttgtgtattacggcgttaattattctcttgaaacagtcactccaaggccgaatgcaccgagcctcgcaagatgggcgcttgcttcaactgtggcgaagaagggtgagtaactgctgggcgttttatactttagtttgctaattggctccaaatacagtcactccaagtccgaatgtcctaagcctcgcgtgttcaggggtacctgccgtatctgcgaaaaggaaggccacccagcggttgattgtcctgagagaccccccgatgtttgcaagaactgccaggcccaaggccacaagacgatggagtgcaaggagaatcgcaagttcgatctcaaccttgttgctgacatgctaccccaagaaggttgggctgcaatgaagaaagccagtgacgaaagggatcttgatgatttccgagaggtaccaaaaatccatacgtaccttgaaagtttcgaactttggctgacctaactccaggcacttaaaatctactccaaggcagtccccaatgccacctgggcagacattgagaagaagatgcgagaggataatttcaacatctacatcattgctatggtaatcaatcatcatcgttctgatacttggggatgaatcgctaatgaatgaattttaattataggaggctgaagttgacgatgtcatgagccttatcgatcttcagggagtacttgaccgtgagtacgtgattggattctttttcaaccccaaggcgtcgcgtggccacctccgagatcgttggcctgcagatgccgaggagaacctagagcgcatgaagagcgccggtattccctacgagcgcaaggtgcctaagtgcctgaactgtggaggtaagtgtttactttgaagattccttataatattgctaaattctgtttagagttgggacatatctcccgcagttgcaaggaggagcgcgccgagggcaatgatcgtgtggaaatcaagtgctcaaactgtgagggagctggacaccgcgtacgcgattgcagacagcagcgcaagcacaagcatggttgccgtaactgcgggtatgtggctgtggtgcaaacaacgaactggataatgctgacttttatgaagatctattgagcatattgcttctgactgcaccgagccccgatctgcggctggtgttgaatgccggagatgcaacgaaagtaagaccttgcccaagatgattcaaatatttcatgatgctaatgtatctatttcagctggccactttgccaaagattgccccactgttgctgaccgtggccctcgcacctgccgcaattgcgggtatgttaaaatatcatagcccctgcgattgtcgctgattctaacatcaatacagatccgaagaccacatcgctcgcgattgtgatcaacctcgtgacgtttccactgttacctgccgcaactgcgaaaagagtaagtgcgatgcatgccccaaagattcctggaaacacaactgacaactgctattttagccggacattactctcgtgattgtgatcagccgaaagattggtcgaaggttcagtgcaagaactgcggagaaagtgagttgatacatgcgtttttaatactgagttagtccgctaacaatccttagtgggtcacactgttgtccgttgccgccagccgcctaaggaggaagagcctcaagacgaacctactttctcccccggctctcccaagcgcgaggaacctgatccgctgaactcagaggctactgaccaacagtttgaatacaagcgccatgacgacgaggacctctggtaaaagacacaattctatgccagaatggggtgactggaaagctctaaaaacaatagcgatttggtttccctttatgccctgttatgatcggccccgtatgagagttgtcgggtgttgactgttcttgggatgcttcacggtggcctaagatggacaagaatctgatgttacatatggggtctatctttgctgctctctttttttcaaatctcgcgatgtgttttgatgtttgccaggatttcacccatgagtttacgatgattgctgaccggccgatggtcccaaaggaggatatctgttaagacttttcatgctctgttgagctcgatttgatttgacgcgcctccggatgaatctgaggatggagggtctgggcaggaggctctgatctggggacatttctgacgtgcattgttatctgacaagttcaatttcaagggaacatccatttagtgcattcttcttgactcattgtagactgcctagtaagatcgtttgaagttgaatgctacaggagtaagtgaatgacggcaccagctgtaaagtgaaccggaaaaaaacaaaaccttgcgcaataattccgactcgtatcatactcggagttcctcagttcggatcaaattcccgaggtcggctttacttggagtgccctatgccatgatttccgatgtcaaaccacattaaccttcgaagcaaattcccgtcgatcattgactgttacctcctagtcgatcgtcgttttactacagcacgttgttaggagttgtatttaccacgtcattaccgggttgatgtatcgtaggccgaatccgggattccggtgccctaactggctcactctatctacttggattagcaagttttggcttttcttggaatattgtgttgaatagttaataaagattactattgtcactctatttacttaacattttaaagtgatcgactgcataattgggtagtatcacgtaaatacagagttgcagttaggcatatccgaatcgggcatcccgtactctcggctaccccgtgattcggcctgtgccgagctatagatttttgtgtgacaaagaggaaggactctgaaatccacatgcgtaggatcaaaccacctacctattttggacattgtaaattcacctacctcgcctagtagttgggtgctaattgccgatgatgtcattaccggcttcggctatagccggtttgacgagcaggtttttcgggacctgaggccggtccgatgtgaggctaacacggaaagttcgtgaccccttgtcaccatccctgccaagtgtgcttggcgagtcaacggtgaagagaagataaaaatcgagtagtgagcgcaaggtaggaagcagtaattgcgcgcagtggtttgagcccaatttcgtgtccacagcaatatgtcttgtgcacatacgcccgtagtcctttcagcggcgatcagcggagaaaaaaaaatggggagtccgggggaactggagaatctccaggtttccgtcaaatgcaaccccaattgagtcccaacaatgtcaaaagtaccccgaaccacgcgagagcctgtgaaccgtgcagctgtcatacacttcatatcatcgacggaaacagaccgtccatgagtccatcggtgctgtcgagggctagaactgatgcaatcacaaatattaccgtattaagacagtactgtcaccgataccggacggagaccgacttgggccaccnnnnnnnnnnnnnnnnnnnnnnnnnnnnnnnnnnnnnnnnnnnnnnnnnnnnnnnnnnnnnnnnnnnnnnnnnnnnnnnnnnnnnnnnnnnnnnnnnnnnnnnnnnnnnnnnnnnnnnnnnnnnnnnnnnnnnnnnnnnnnnnnnnnnnnnnnnnnnnnnnnnnnnnnnnnnnnnnnnnnnnnnnnnnnnacttggccatgcgagggggctcgcatggccaactacgtgctcctcctgacgccgaattgccaggtggatcctttcgaaacctggaggcataccgatgatcacccactctctcgtctcggctgtcaagatgtggtatagtggctcgctcccccccgatcaggccatggtgtaggcatcgccaatgcaacgttgctactgcttctcattggcggcttgtctcttgctggttctgacttgatattagatgtggatactccccttgtttgactgcgaagttcataacctgactggtttccccggacctggctgtttcgttgttgaatctccttttctctgcctagctgcagtctgtccatttcaaatccattgaccccggcgaatagtcttccattctaggaattgactataagtctgtctttcttctgtaccctacaacctatacaccatatccgccatcatgaaaccatactttggccttcggggcacgaacctgaatatcatgatcggtgttattgccggtcttgatttcttgtatgttggtctttccattatctacttttgaagtatcactaacgcgaattacacaggctatttggatatgaccagtatgtcatcgcgaactgaacgtgcgaagtcttgtggtccttgtgctaacactcaacagaggtgttatgggaggtctattgacattgaactcatttgttaaggtcttccctgaaatcgacaccactaaatcgagttcatcgacgggcagcaacgcgactacacagggtatgcaattcatgacatctctcaattcattcatatactaattccgcaggaataaccatcgcttcttataacttgggctgtttctgcggtgcaatcctctgtatctggattggaaactaccttggccgtcgtaagaccatcttcgccggctctatcatcatggtgatcggggctacgctacagtcctgtgcttactcgctgccgcatctcgttgtcggccgtattgttactggtatcggtaacggcatgaatacctctaccgttcctacatggcagtctggtaaggagtcagctctgttgagaggagcccgatgctaatattacctagaatgctccaaggcccaccaccgcggaaaactcgtcatgctagagggttccttgattgctgctggaatcatgatcagttactggcttgactttggtttctccttccttgatcctagctccgttgcgtggcgcttcccaattgccttccagaacgtcttcgcattggtcatcttactcttcgttctaccactccccgaatcccctcgctggctcatcctgaagggccgcgaacaggaagctttgcaggttctctccgcgatcctcgatttggatgagaacgatgcctacgtacactcggagttctctgccattaaggatgccgtcctggctgcctcaagtgtcagcttccgtgacttgctcaccatggatgagaaccgccacttccaccgtgttgtactcgcctacgttaaccagatgttccagcagatctctggtattaacctgatcacctactacgctgctactatttatgagaactcacttggaatggatggcctgacatcgcgcattctcgccgcctgcaacggcactgaatatttcttggcgtctttggtccctatcttcattattgagaagatgggccgaagaatcatgatgttgatcggtgcggctggtatgtcgatttcaatggctgttttggctattaccactagctttgagggccagtccaagcctggtattgccgctgctgtattcctgttcgtcttcaatacattctttgcctttggctggctgggaatgacctggctatatcccgctgagattgtaaggctctcatctcttttattcctttacactaaaacaccactaacaacgcgataggtgcctctacgaatccgtgctcctgccaacgcactcgcaacctcgggcaactggatcttcaacttcatggtcgtcatggtcacgcctgtggcattcgacacaatcaagtacaagacatatattatctttgctgtcatgtgagtatattctgcgcggaatgcattagtgcacgactaactcggctcctattagcaatgcgttcatcttccccgtcgtctacttcttctaccctgaaactgcctatcgatccctggaggagatggacacaatcttccataagacatccaacgtcttcaatgtcgtctcggtcgcccggaacgaaccccaccgttacggaaagaacggcgagcttctcatcaactacgaggacaccgcggagcacctgcgtcgtgctagctatgtctcagagaagaagattaagctggctagtgggatggatgatatggagtctggaaagggtacccatgttgagcaccgccaggacagctcgtctgattaaattttagagaaggcattcttcttatgttaattatttacaatgataatcaacgattcacgattcggtgcatcaaatatttcatataaccctcatgtaggtcaaaaggtatcaacgacagaactcagccacaaatgccccattcaacctcacgctgaatcacaacgtgccatggccgctcacagcccaaaggccaatccaccaatcgcagcagctaggacagcagccaggatgccagtcccactgacacccacacttgctgcagaacctactttcatgattggaccagctgcaacccctccatctgttgaaccagacgaggtagtagccgtagcagtgacagccgaccacaacgtgacaggctctgtcgagctcttaagggaagtcgccgagaaaggagtcgtgaacgagtaacgagacgacttgctgctaagcgaagacgtcgcctcggcactgtttgtcgcataaacagaccagactgtgtaagtactcgtagttgtagaagtgaccgtctgaacagtgtatggggaataagaagtccagtaatagaaccaataagtcctatactacaatcagcaaagcatccacaaaccaaaaaccaacataatcagaccacataccagtagacagtcgtataataataatcccaatcaaccgcaacataacccgcagtagcagtagtagtagcagtagcagtctcaacctccgtcgccgtaagcgtagccccagccgcaaccccatcatactccccagcacaacccgtcagcgcacagcaaaccttctctcccctgtagatccgacacgtcctcccgacccgacagtagtaacccccggaacagcactgcgcaccgagcggcgcacaccccgtcgtcccgcagcacttatacccgagcggacacgtcccgccaccagcgcagcacgtgtcgcctatcgaggcacagtacccgttcccgcagcacttcccgccgatccgacagcagcggcttgtgtcgtatgcgcattcgctgtacccgattttgcattccagggcgcgtgtattcagggttgagttctcgccggagaggactaggggaagggagaagatatcatctgcatcgaaggagatggagatgttggagaggagttggggctcgtcttgatcggtgggtgtgctggctgctatgttggcaaggaggagggatagggctaggcatgtaaaggaagggaagaagattggggagagcatcttggagaaagaaagcttggtggcttggttatggtgtactgctctgttggaaatgtcggggtggaactgcgattttaagtcgcttcccctgggcactgcctacatcaatgcggctggataaaagataaatatgcccaagcgagcatgtttaagattgttgttcgtattcacgggaatttttgggccatattacctataagggttgggttgttatgtttgcaaatacgaggtgtgtcgcttggcgcgggctcgagccgctttttcttggttgatttacggggtgctcgctgtatgggaccgagaagaggggagccgaaactgcgctagatagtttggcttgctcctaggcttttttctcgttgataacgttgatgtaaaggtctggaggtgttcttggctttagggcttagcgatcctcgtgatagtgctccatttggttaggtcagattctcatgcagtgtttctttgtcaagatgagaatcagactagcaattgatttggtttgtattcgattccgagaaacacacggtcttgttgtagagttcgagctctatccttggacagggtcgacgttgtgaagaggaggacatctccgtggaaagaagtatcaagactcctaatcctagtgcaccatatcatttgtcacatatggaacctcaagaagagttggtatctctaggaatagcatagtctaaaacatgcgttagcaggagacaacgaacatgaggaacagctgaagtgaaggaaacaaaacaaacaggtcttgattcagtccaggcctaaatcaggcattaaggcattattatttactcaaaatggggttttggcccctggcgtcggactacatatgcacactatgattgtgacacaagacctggctctatttcttgcgcatgtcagctcactacacaactatctctcttttcagattcaaggctatttgcaataagccaaagcttcatcttttgcctgtacccgagccctaccatgacccgatttgagtattttcgatagaccacgtgatggtcccgagaccggcgatcaagatgttgatcataatgagaatacataaaagactttgaattgcgaaagtagttctgagtcatttcgtgggatgctgttttgactggacatgattcaatggtatgtccatagcattctgaaagctagcagctaacagcttacagctccgcaagtcaaagcagaaaaattcaaatgttatagtccaagatatagaacggaccaagacccataggaggtgaggatagcctcgggagaaaaagatttaaggttatcctcggtgaagagctcgttgggaaaaaaaaccgaaggatcttccctcaacctcaacctcaacctcaatcttgaaaatctcaacctcaccggagatttgaattccatctcggatgttcaagtctatgagtcacgcgattcgtgcataagactataagacttccttaatatcggggacttttaaggatcttattgaggggtctttttctccgccaagatccacccctctctttatcagatccgaaaacggagtattttttcgagatccaagtcaacgtatgtttatacctctctgacctcagggaagatagcctgtgtccaggaggaattgaactatacaaaatgaacagccattgactcacaattcacagaaatccatctagttgatatcccgggccattggcgtccttcaattggcattgcttttagcggctatttgcccgcaaagaggctgaataaagattctatacacatataatattaataagacgacaagatgtccaccaaagatcaacatgcctctgtcagcattgacaagcaacctatctctgaggatatttccgagcagccagagcctcaaagccaggtatcctcagacgacgtcgactccttggaccatagcgtggccaacatcgaacgaatctacaggtaaatcgcctacccgaaagacaatccaacttcagaacctaacatccacagaaaactggaccgtcgcatcatctccgcattttgggtcctctacttcctttgttcagccatccggtcgaacgtaggcctagcacagacaatgaacacagactctggccacgacctcgcaagtgtgctccacctaacccgacacgagatctcaaccggtctcgccctcttctacgtctgctacgtggtcttcgacctcccgtcgaacctaatcatgacccgtctaagcccccacgtctggatgagccgcatcgtggtcagcgtaggcctaattggaagctgtctcgccgctatgaaggcagcctggagcttttagtatgttcaattctcccgcaccatcccaattcatcccacatcatgtatctaacaaacctagcctcctccgcctcctcctcggcatcgtcacagcaggcatgtggccaggcatgacatactacctaaccctcttctacccaccctcccgcatcggaaaacgcatcggacaatacttcacagcctcgcaagtctccgccgccgtcgtcggactcgtctcagccgggttccaaaaaatggacggcgcccacggcctcgtcggcttccagtggatgttcctcgtctacggcgtcatcaccgtcgccctgggcttcggcctgctctggtggttaccggacagacccacggcgccgggcgagtcagcgccgaaacgcacctggatcatgcgctgggtgcctgctaccgcgccggcgctgaaaggcgctgacgccgtcgtgcactaccatgacctgaagcgcgtgtatcactcgtcggcatggacgctgcgggatctgctcgcggtgtttttggattggagactgtatccgctgctgattatgtactttggtgttgtgggtgttgggattggcgtgcagttgtatgcgaacttgattatcaaggctattgatccgactttgagtgatgtttcgttgagtttgttgacggctccgatttggattgtaggtttcccccctcttcttatcctttcctcctttctttccgtccaagatccatccgctaacacatctatagatggacctcatagccatcctcctcgtaacccccctctcagaccgcttccaccgccaccgtgcaatcttcttctccatccccgtcctgctccaaattctcggcctcctcctaacaacctacgcgggcacagacgccaacccgtggccacggtacggcggcctcctaatcgtcggattcggactaggcccaacagtcccgataaccatgacgtggacgacggagatcttccagccgcgacacggcgaggtcggcgtagccgctgcgtcggctgttgtctccggactcgggaatctgggcagtatcctcacgacgtatgcgctgtattcgggctggaagagtgactacgaggcgcctgggcgtgagaagtataggaagagtaacctggtcatgattgggattctcggggcgagtattgtctctgccgggttcatggaggttatgttgcgctttgtggatgggaggtatcggggtggtgatgatgagggggcggttgatggggctgccaggcgggaggtgcggcagcgggggttgcatgggttgggggccggggttacgcgttggttgaggatggggaggtgatcggtagacttgtgtgtggccgtggtgcaacggtgaaaatgttggcatatttctctagattttctgcttgcgtggacttttatagaactatagaagggaatgaatacgatctactttatagatggagaatacctgcttcgttcatccagatccatgcttctacaaagttggtcgtgctcggctatttgatcctgtcatatactccatgctctataaaggggaagaagcttccgttggatgctggagtgatactagattgagttcaagatccttccatgtgagatcgaaatactccgaggtctgattaagattagaccaatgaaaaaggaatacgaaaagtacaagagcagcaattcggcgtaagcgcaaaacaaagttgaggtcagtaacaattgaacttggtattaattgtcgattctccagaggaacgatatcagtatgatatctctcgataaacgatggtgtggtttccccatccatgaatattctatgctattgtacgtgtcacattaccctgtgaagggaagtcgagagaaacagaaaaaaataagtgcggctggtgcaacgagggagggccagcaggaacgcataggcggacactggaaccgggagaaagaaagggatagaacgagaagaaagacaggaagaggaagagagaaaaggcagatcacagaacatctatgggggctccctcacgcagtcaagccgctctggtccgactcccaggttgacgccgagggtatcggagcgctaagaccaaatgattccaatccatttagatgccaccacacatagtctcaacgatgataccggtaatctggtagggatcagcgttggaagcggggcgacgatcctcaaagtaacccttgccgtccttggcgcactggcgggggatacggatggagccaccacggtcggcaacaccgtaagagaacttgtcgatgctgccggtctcgtggcgaccggtgagacgctcctcgttaccctcaccgtagacggcgatgtgctcaacgtggcgggcctcgaacttcttcatgacggcctcaataaccttcataccaccatcggcacgagtggcgttggtggagacgttggagtgaagaccggcaccgttccactcacccttgatgggcttggggtcgaaggagatgcggacaccaaactcttcagcgacacggtggagaaggaaacgggacatccagagatgatcacccactaaattaacagttagtctcagatattcattgcagtccgggattgcgaaacttactatcgatgccagggcaggggccaacctggtactcccactgggaaggcatgacctcggcgttgataccagagatgttgataccggcgtacaggcaggcacggtagtgagcctcgacgatatcacggcagtagaccttgccggtaccgacaccgcagtagtaaggaccctgggcaccggggaaaccgccacggggccagccgtagggccacccatcggtaccgaggagagtgtactcctgctccagaccgaaccagaagccctcgctggcgtgagcctccatcagacggttggcatcatgacggtagttgaacttgttggggcttccatcggcatcccaggtctcgcagaggacaaggatgttgtcaccctggcggaaggggtcggggtagtaagcgacggggcgaaggtagacatcggagttgtcaccgggggcctggttggtggaggaaccgtcaaagttccactcagggagctcatcaacactcgtgacgggcttaaagagagtctgttggattcccgttagtgagttgttcgagggagcgcgatctcacgtgacggcgggtggctgcgtcgcatagatcaagaatccccgtgcaccatatccgtgcacagggcttatcacagccgggaggggattccagataagaacacgcagcaaccacgcgccgacagtccaccatgtgtagccagagaaaacgtgggaattgagatgagtcataccttcgtcttggagcgagtgccaccgttggagtcaatccaaacgtattcagcttgaacgcgtccacgctggtcaaggttcatgtatttcatgagctgtttcagtcagtatatgtcattcctcactggctcgaaggccattgtggaaatccaaaatcaagaatcaaacgcacattccccgtgttggagacgacagttgcagattcggacgcctgagaagaagcggtcagcattggttctacacgcacaagagagagggatgactcgtaccatagtgaatatgggtatgtgtgatgttttaacaggttttcaagcaatcaagcaatgacttttgtagagaagagtcccgaaggaaggaaaacacgaagggacctcaagaatagaaagcgaattggatatggatgggagaatccagaggagagaatgagttttaaagatgtggaggggcaagggagggatgataacctttgggaaaaaaaaaggaatttaaatttagtcactgactttctcttttgggaatttctttttttatttcttttgtttttttcttggcaaaatcaggaaggcgcggctcagccactacctaaaggggtcaagcgtggtatcatcgctgtaatggtctgtaaagcggtcgaccgatacggggtacagataaagtacctcatacatatttgtgcgcgtcggcaaagcctttcctgaaacgttggggaattaaaaaaaaaaaaaagccctcactctattttagtgcttctccgttctccgttctccgtcccgtcagtattctccagttatttcaatataccatttttaatgcctcaatatcaaaatagatcgtctacaatgtcacaaggacctcttagtttttcttagtttttcttcagccgagcggaacgccgtagcctgtgaagttgcaacttttcaccgagattcaacgccactcattaacttccgtgtcatcatcgtcgcatcatccagacaccccccc

SEQ ID NO: 110 - DNA, 296463 bp, Penicillium roqueforti
  misc_feature (113)..(1575): n is a, c, g, or t
  misc_feature (13292)..(13456): n is a, c, g, or t
  misc_feature (30858)..(31005): n is a, c, g, or t
  misc_feature (105392)..(105535): n is a, c, g, or t
  misc_feature (186993)..(187000): n is a, c, g, or t
  misc_feature (220865)..(221110): n is a, c, g, or t
  misc_feature (242052)..(242296): n is a, c, g, or t
  misc_feature (276529)..(276747): n is a, c, g, or t
  misc_feature (282170)..(283870): n is a, c, g, or t
  misc_feature (288862)..(295148): n is a, c, g, or t
aagacaattaactcagaagatcaactcagagtattaactcggaagattaactcagagtattaactcagaggtttaactcagacaattaactcagaggtttaacttagaggatnnnnnnnnnnnnnnnnnnnnnnnnnnnnnnnnnnnnnnnnnnnnnnnnnnnnnnnnnnnnnnnnnnnnnnnnnnnnnnnnnnnnnnnnnnnnnnnnnnnnnnnnnnnnnnnnnnnnnnnnnnnnnnnnnnnnnnnnnnnnnnnnnnnnnnnnnnnnnnnnnnnnnnnnnnnnnnnnnnnnnnnnnnnnnnnnnnnnnnnnnnnnnnnnnnnnnnnnnnnnnnnnnnnnnnnnnnnnnnnnnnnnnnnnnnnnnnnnnnnnnnnnnnnnnnnnnnnnnnnnnnnnnnnnnnnnnnnnnnnnnnnnnnnnnnnnnnnnnnnnnnnnnnnnnnnnnnnnnnnnnnnnnnnnnnnnnnnnnnnnnnnnnnnnnnnnnnnnnnnnnnnnnnnnnnnnnnnnnnnnnnnnnnnnnnnnnnnnnnnnnnnnnnnnnnnnnnnnnnnnnnnnnnnnnnnnnnnnnnnnnnnnnnnnnnnnnnnnnnnnnnnnnnnnnnnnnnnnnnnnnnnnnnnnnnnnnnnnnnnnnnnnnnnnnnnnnnnnnnnnnnnnnnnnnnnnnnnnnnnnnnnnnnnnnnnnnnnnnnnnnnnnnnnnnnnnnnnnnnnnnnnnnnnnnnnnnnnnnnnnnnnnnnnnnnnnnnnnnnnnnnnnnnnnnnnnnnnnnnnnnnnnnnnnnnnnnnnnnnnnnnnnnnnnnnnnnnnnnnnnnnnnnnnnnnnnnnnnnnnnnnnnnnnnnnnnnnnnnnnnnnnnnnnnnnnnnnnnnnnnnnnnnnnnnnnnnnnnnnnnnnnnnnnnnnnnnnnnnnnnnnnnnnnnnnnnnnnnnnnnnnnnnnnnnnnnnnnnnnnnnnnnnnnnnnnnnnnnnnnnnnnnnnnnnnnnnnnnnnnnnnnnnnnnnnnnnnnnnnnnnnnnnnnnnnnnnnnnnnnnnnnnnnnnnnnnnnnnnnnnnnnnnnnnnnnnnnnnnnnnnnnnnnnnnnnnnnnnnnnnnnnnnnnnnnnnnnnnnnnnnnnnnnnnnnnnnnnnnnnnnnnnnnnnnnnnnnnnnnnnnnnnnnnnnnnnnnnnnnnnnnnnnnnnnnnnnnnnnnnnnnnnnnnnnnnnnnnnnnnnnnnnnnnnnnnnnnnnnnnnnnnnnnnnnnnnnnnnnnnnnnnnnnnnnnnnnnnnnnnnnnnnnnnnnnnnnnnnnnnnnnnnnnnnnnnnnnnnnnnnnnnnnnnnnnnnnnnnnnnnnnnnnnnnnnnnnnnnnnnnnnnnnnnnnnnnnnnnnnnnnnnnnnnnnnnnnnnnnnnnnnnnnnnnnnnnnnnnnnnnnnnnnnnnnnnnnnnnnnnnnnnnnnnnnnnnnnnnnnnnnnnnnnnnnnnnnnnnnnnnnnnnnnnnnnnnnnnnnnnnnnnnnnnnnnnnnnnnnnnnnnnnnnnnnnnnnnnnnnnnnnnnnnnnnnnnnnnnnnnnnnnnnnnnnnnnnnnnnnnnnnntagtaaattggatgcacaaatttaaggtccctactataagtactcaaaatttcaaagggttaaaatacagttaagaggtagttatggtgcgtacaaaatatggccgaattaggttagtgtcattcttcccgtagccctaaacctcaaagatataccttaactttaaccacgaatttcagacgctacactagctggatacgaaagataagatatgatctagaatgcttaagaaaagggctttctagtgatactaaaataatagtaaatactcattattttatatgtacttaggctctatgatttcctatatagaaacgtctagctagcgcggcacccaggctactagcccattcaacccaaacgcgattgaagaaactgtttaatagtgctaggtataccaaatcctgtttctagcacgggtagatatcaatttatgtccgcgatccccggataccggacataataggcctgccagtcatcaatctcagtcatcttgtggaatcccggaagctgcacaatacgccagcgtatgttcatccagcccacgtcatcctcagtacacccttcaaggggctcgaactcctcaggctctgatatatcctcgtcctcagagtcctcttcaggcacatctgtccatttccattcagcattaaccatgcggacatgccctaattcatattcttcgaaccctcccaagggggtgtttagaacggactccatagcctcctggtccacggtgatgaagaagcggtatcggccgctcgttggagtatagtcttcgcttacgccctgttcctcttttaatgcagtcttcttccactgatagaagtgctcgcgtagggtggcaaccgtggcaccctcaaaggaggggtcttccaagaccgttggggcgaatgtgtcgaggagatcaaggccactgtattccttaaggtcttctgagacggcgccgaccatgcgagccatgaagttctcccagtcagagtcattgtggtacgtgcaacgaaagatcacgaagccccaggttgtgaatccatcctccttgagaagtccctcgaccagatcagccccattcataaaggaatacattgtgggatcgcgctttgagcgagaggccattgtggtggatgttgagagactcctgattgtgttgaaatgtgatgtagataaggactttgcgagacgtgagggaggttcgaagggaaagcgaaagaaggtcgggcgggtaacgcttgggcgggcgaattggctgtagatcggtagatggcgtgtagtttgaagtatcctcctagtagtcatgagtgcgaaggcaggccttggttctgttgagatgaggataagtaggggaaagaggtgggggctagggggtatggtccaggggcaagcaggatctctcaagtttgcagagatttaaagtggagatgcgagtataccctcaaacgctttaaattgcttaaatctcaggttcccaggatgatgaaacactacgcccgtctgggcaaggggagaagtgatcggagcctcggagggccggccggggaagggattcgcgggtccgtgttatcgggcggctcggaataagttcgatacgcgcgctatggtcataaatcaagagcaatttcttctaccgtggatactctgaccatttagtcgcaattttacccacaagactgggcagttgcaccttggcatgatgtcttatcgacttacaccacactaacttcatacatacgcatctatgaagaaacccccacacacaccgagtacccgactcctagatactcacagtccgatccaatcgcaggattccacttgtatagttcagcaaaagtaataccatacgcggtctcgatcttggcgcacgaatcgttcgacaccaccgtgtaatactggttgcagttcgacgcgattcccgtctgagtgggtgcacttgctgttgcgctggtcgtcgatgccggtcccttgacacagtatgcttctcctagccacaaattggtacaagtagagccaacactggggttccactgatagaattgagcaagggtgatgctgaacttggtctcgactgtggcacagtcgtcgccctttgtagtggtgtagaacttctcgcatcccgacacagtgtcggttggagtgggccccatggaagaggaggaggaggtggtggtgggggtttgggtggcagttccactggctgtagtcgttgcagctgcagacccgacaccaatacagatggcgcggtcatccgtggcatttaggctggcatagagcgcagtgtcacagtctccttccagccagctgttccaggacacaaggtcgtccatggtcaggctgtaatcgtaaatgatgtcgtcgcaggtgtatactagcatttgattagtaatagcacgattggggagggtcaaatcataccgtcagagtaagacaggtcgacggaggtgaagcaattgcagttgaatgccgttccagcctccgtagcattcatgggaaggcagagcccactatcagtatcctccgttgctacatctgcgtcagcctaatctatttgttcgagccagcggtacttacaggcagtgctgttttcataccgcaggatgcagtagctgttttccttgttgagctcacaggtgcttgcgttgttcacaagacttggattccaagtgaccatttgtttcattgtaatgccccaaaatgtcgccatcgccacacactcagaagtatagttggaaggattttcgtagtcatagcagtctgggatagtgcccgaagcggtgggaaggagcgccgctcccgtatacacatagccaggatcgcttgtggccgtaggtatgtcagtattcacgttggtgaagttgacgggcgtgacggtgatgggcaatactccagtcaccgtgtagtttgcgtagctggtgattgaaccaacggccttaacacagtatgcctcgtcaagcaggaggtttgtgcagtttgcgtcgatttctgggttcaggaagtagaagtcggtaagggagatagaatgggcgagagagaccttggcacattcatcgcctttttgaacctagtagaaatgagcaaagacccaacttggatggaaggatcactcaccgtataccactggctgcagttgcggttgctattgtccatagcatttgttgggaccgctgcaatgccagtggctactccagtttcggttgcgcttgagtcggatccaccagcagtctgattcaagtagccactcgggggactgtaaaggtcaatattccgtgactctcaaattgagattgaagcgaaatctactcacctcacacacacctcatatccaatgaagaaaatcgcattcagacagagggaattgatattggggttccaggagaagaactgcggaagagtcacattcgcgaggccgccgacgacactatcgcaagtgtcatcagcctgccaggtgtgtgtggtgcactgcgaggggacacagagtgtctggttgactttcgccgcaaagttttgacagtagagatccaagtcgttggtttgcagtaggtagtatgtagagactcccagcgactttgccacggagttacagtcgtctgtttccttcacctgataatagttttcgcagctggttgttgccgagctggttgcaggcgagctggttgcagtcgcagttgcattaagcgcgtacgcagttggggaagtgactgagtaacccgtggcgctgcagctcgacgtcaaagaagtgaagctgtccgccacgccctcatcataccctaaggggctgtttaattgagtctctaatgtccccagccaacaatccgagcaagaaccattaacaggccaagacccgttggaccaggagagcaattgcgggtcacagtaacccccggacctaatgatggtcagaatcgataatcattggcagaatcaccactcactcatctttccgacaagatatgtcataggtcaacatgtacttgtcagcgataaatgtagctggataagctacatcctcaacgacgatcacatcggtggtctctgagcaggccgccttgatggttgctctggcgcttttcaaagaactatagcaggtgtcgacgcaaagttcatcgacttgatcaccatccagaagagagttgctgtttaaatcagctttgagcccgcaatttatgaatcagacctactctggggacacaacgggcagaaatgccggacaggacacattagtcgacaaggcttctttgcaaccatcggtgagaccaggatagcttgtgaatcctcgaatgccagcaggctgctgggcaagggccgtggaaattagtagagcccacggggcagtccacatcccacgcatctttgagcaatgtagtaatcaccactcaagataatgaattggtgagactgcaaccactagatagcctggtatacaagtattccagagctcaattcacaaggaagagagaagaaaagtggaaaaatgatgttgggacttcgctgagtagttccatatgcagagcaattttatcattctgcatctagacaaagtatatggctcgttcagcactggcccccaagggtacaatcgtttccacatccacttcacttccaatcgggcatatcccggacgggtctcacgaggattttgagattactgcggagctcaagggctgccgcttggttagactagaatcaagcatgcaggcgaagacttagcgatcacttgaaacatgagaaattttctttggatcgagtttagcgagggattccaagctacggagtacgcgaagagtacctcagtggcttgatgcggatccttcggccgcgtaccgtgggctcgactagtagtccctagtagtccctggcttagcgtcggttcacctactcatcctgtctgaaccgggggccaaatggtgggtcgtaaaattaaatcaaaccgcgcgtgcagtagatcgatttcacgctccgtagttgagagtatggtcagtggccttgacgaagatttgaatttttgaatttttggatgggatcttttgataccgccaatccgagtagtatttggctttctataatcaggctgatttgtagaagcctagaatagcagaatatttatcgcaacaccaatataagatacttttcacaaactccggatcgctcggttgatccaccagcttcagttaattaatacctcattatcagtgccggtggtttcatccatttttcggatacctagacgtggtggggctttatgtaggatacctagtgtagagctgaaaccacccggtgtagacccacatggcgtatctgcaagcatgctggaacaatgcacttagcgtatactgcccaaaggccttctttgcagggctatctacatttcctgtaaaaggagggatttctccaagtccagtgtatcaatgctcagtctattttgaccctgttcgttctttccatcatcctttccttcatttctcttgcatgagattgccttgagcaagccaatctgctgcaatggctactggtcaagctttcaaaaaggagcacttctttcgtgttctctttggcattgtgcttggcttattgtgtctggtcttctggccgcacagcttgaaactgtctggctctagtattgctcgccgcgcttccactgttgacagcttagaagtcaataaccacgtttccatctctgcccgagatgattactcctgcagtgctagcaatccctgcagcaatggagcttgctgcggtgccagtggctactgtggctacggtgatacatactgtggcaaggggtgtgtctcaaactgcgatgctattgcagagtgcggaaagtacacgcagcctgcgaacaagacatgcccactcaacacttgctgtagcgaatttggatttgtgggttgctatttcataagttagacgaacacggttaacctctattagtgcgggacaacgaaagacttctgcaatggtatgtccttcagttcctgatctcaaccagagactgacgactagaagatgcttgccagagcaactgtcatctgaatgtcactgtcccggcaggtggatcctcaagcggtgtactgcaaaacaaggtcatcggctattacgaggcatggatggctcgtaagagctgccacaaaatcaagccggtcaacttgccattggatgcactgactcagtgagccctattgctttcctaaccagtcatgcccatgctgacattgagcagtgtaaactttgcatttgcatcgattgatccttccacatatcaggtcgttgcgatggactcggcaactccgacaagtctcttctcagatgtgaccaacctcaagtctgtgaaggaagatatcaaggtctatgtcagcattggagggtggactttctctgataacggcaccgacacacagcccgtgttcggagatatcgctgcatccacgagcaatcgcaaaaagttcgccaataatgtggtacacttcatgcgtcaatacggtatcttcacttatttgtttgtttgtcttatctaatctttaacagggtttgacggtgtcgatcttgattgggaatatcctggtgctggtgaccgaggtggcaaggccagagacacagaaaactacgtcctcttgctcaagaccctcaaagaggttttcgatgatagcggaaacaagtatgggctgaccttcacagccccttcgtcatactggtatcttcgatggtttgatctcccaaaaatggtcaagtacgcggattggattaatatcatgacatacgatcttcatggagtgtgggatgcctccaatccgattggaagtattttgcagggacatactaatctgactgagatcaagagtgccctcgatcttttttggagggttgaggtccctccctcgaaagtggtcctgggtcttggattttacggtcgtgcgttcacccttcaagataaggaatgttcaaagcccggttgtgcattcaagggtgcctcgggccctgggtcctgctcggatacagctggtatgctcgcgtactatgagattgccagcattctgcagggaacctcgaagaaacgagccaccatctccccagtccacgataaggaggctgcagtcaactatttcacctttgatgacaatcagtgggtttcatacgatgacaagactacattcaagcaaaaggtctcctgggcggatgaagtcgggctgggaggggcaatgatctgggcatctgacttgggtatgattttgcttgctctgagcgaatttacactaactattcattagacaccgataaatacgatgcccatacagacctcattgatcgagaaatcatatcgacatcaacactcaagcttgagaacaaggcaaaggcaaatcccgggacaaccgtcgaagatttgtctgcgttcacagggcagaaatgcttcaagcacacagggaaatgtctcaaaattgacgatacaaaagccatgtccaaagcatgtggcagcggctatactgttgtcggctgggacgacgcagggtgcggaaagtccaactgcgtaagtgaaccatctatgctcggtcaattcatgtctcacgattctgtcttcatcagcattgcggaaagccgatttgttgcccaactggtgccgccccgaagaactgcatgtggcgtggacaggatactggccaaaagggagctagttctgactgcagcgggcaatgtgccgcgggagaaatcaacgttgccggcattcgctcttcttggggtggcgggtatctcaacgataaaaacacgggcaagtgcggtcgtggctataaggcattctgctgtccagaccctgactacaagcaagttaccaagacttgctcttgggccaagtggtgcgtaccaactcaagtcaattgactatgcaccaactgacttttttacacctccagtggggagaactgcccacccagaaaatctgctgttctaacaaagtatgacgaatgttattccaaaggacgaaagtattgttgttccgatccagcggagctggtcagttgccaatgggagaatggaagcggcggtgacggcgattgcgcgaatgccgtgtgcaattcaactcaagttgagatcgccaagtctaccttaggtgatggcagtacctcttgtgaatgtaagtttgtctactttcaatctctcgttttgctttctgtatagtggcctaacaaggatctgattagggggccgacaacggtcaggatgctgtacagtgacgaaggcgccaacccgcaaggcaacctgcacttacaacatctgcgacttggattccgactattgctattccgatccgcttctttataagagagacgatcaagacaccccagactccgattacagtggtgacgactccagcatcgccaaacgtgctggtagagaacgcaagacattcaaaattgtacttgggacattcagctactggatcgcgggctatccaagcattggcaagctcttaaatccggaaaaatacggagctgctttactcacaaaggctttccgaacgcggagcggcttttgcgcaggctctacgctggatatcgtcaacttgccgaaaaatcctactgaaaagcaacgaaaagatcttgacacagagcatccgcttgacaaggggttgcagggacttttctacaagtacatggggaatcgagagctcccaggcgatagatccgccaatttcccaaagattgatcccaagttctgggacaaattcaatgagcccaatgcaaaactaggtgccatggctcaattcggcaaggaccgcaagggaaaaaagccgatgtccccggcagagtatttggccgaagcttatgggtccgaaaggaacccacggcccttcatgccggttgaaaatggcctgaatattgccaaaagagatattttcttgggcaaatctccggtccaagctacaaagctcaggaaagctgcaacgtccgctgtcaaagcggacacagatacagcggcagacaagatgctttcgttgcttcaaactgtaagtggctatggctttgttctggatttcacgcaagctaacccaggtttctaggccttttcctcctttgaatatattcgaaatgagatgtttctggagagattcgacggagtgatcgatgatacattcacagcttggagtaatatcgagcaggcgactgagacgtataacctgcagaattggcacgggttggtcttggatgctcagttcacgtatgccctggatcaggcacgtcgctgggcacgggaatcaattcgaattgccagggctccgtatgtcgaagcatatgaggccggtcgcagcttggccacttatgatcgtgtgatgactgccttggatcagtttgaggatcttatctcgcagattaagatgccggatgttacttccgaggactacaagaagcggaatccctataatggtgaggggccaagtggatctaactcatgatttagaaccttgaaaatttacgattccaattcaatgatcagccttaccgagtcttccagcgatgcatcttcactctggtctttcggagagctatgttggtctgggatcgatcgatatatactgcgtatgacggaaagtgggtttccctgccgagcttcgtctttcccaaagaggaaaaggtgcctcaagatgattattttcaaaatctcccagcgagatggtgaggctcgggagcttgaatgtcgtaactgatggcaaatataatcagctttgtagtcttaaagcagttgaagtgtctgaggctggtagggtaccgaaggcgcagcagcaatgtatggtagaatcgatgattgtaggagacaagagagaaaaagagagagaagctgtcgaaatctaaactacgcgggagccaaacggggagccaaacatagctataaccgaggaatctagggagagaggcaaaagcgggctgaattggctaaatctactactcattgcctagctggggaaaagaaggaagagagagagagagagctatatagtccggataatcacctaaccttccaatccaagaataaccaactagcctccgaatactgcgagagatgaaagggaaataaaagtaaaaaagtagctataaaacgaagtttacgtcggcgggggaaggagcatctccctacaattgcaatcgtcacgtcgccacctgttggctaagtgtcaaggtaatgtacgagttcttagagtaaaagactaggaataattgatttttcaatgaagtacaagtagtgatttaaggtgtgatgtttgtgggtctattgagccccggtaagtggggcctttgatggtctttaatgctattcctattagtgtactaccatagaagaaagcggtctatggtagaatcttagacttaagaagataatatatagttaaccctattaaaatatcttaaatccgcctatataataaagggctaatacctagtactaaagctaggcttagaacctatacttttataagtagacttcttagggagttcaatataaactattaaaaccttagcgcgatttagcctacctgagacatttatttccgagcctccgtaaaaaaaagaatatttggaaatgttcctccagaattaccccaaatgaaactcaaatcctcttatgtccgagtgctaccgctgatccagggatttgggcttatttcgggttcggctgtagcggccgagatttccgagtgcgtaaaaccaagtgtatcttcggagtcacctccgacccgaactcggagctcggcttagtggacaggccttttccatatgaatttgccgaggggtccaagtatacctgcctgccataagcccgaaacatagaaaaagacctgcaattgaaaagaatgatggattaaagcattgtagcgtttctacgtctgcagtatcggtggagatactattcaacaagggccgagatttattaggcgtgagtagaaatagtttgaacgctgagaccatgcggcggttaatgttgttacgaggtatacagtccactgccactagtagcagacctctattatccaaataaaatagtgtgccatcctgagtggtgtgtgtgtctatctcgaatgatgacattatttaccagatgatcgacaaatagtatttcctacttggatagagaaccctcatttggacgggagataaaacaagatgtcggaattgtggatctatgtaattagataatccttaccctacaaacagaggagctactccggcaccgagtcaccgactacgaaggtgtatagtggccaacagtcggatgcctgattttaatggttttatcgcctaattgggactagctcttaccagttttagaccgcctttgacaccgctcaataccatcttttgtaagtacacatcgaagagacgaaactgttaccatggggtaattcaaatgccttctacctattttaattctcaaaactacattcaaatattcgccacgccggagccagaggatacggagagtttgaagtttatacggtcggtaggaatggggactttgtgttgaaatccaggcttggctttccaaccgttttgggccttggtgtcagttgcgctattagcttttctccgggaaagtgcgggactacggcgggtatgaatggctttaaatacaggagattcatatagttggagggccttaacgcctaggatcgatgagaaatagtattttggggggggggggggggggtatgcaaactttctttttccaatttttaaccnnnnnnnnnnnnnnnnnnnnnnnnnnnnnnnnnnnnnnnnnnnnnnnnnnnnnnnnnnnnnnnnnnnnnnnnnnnnnnnnnnnnnnnnnnnnnnnnnnnnnnnnnnnnnnnnnnnnnnnnnnnnnnnnnnnnnnnnnnnnnnnnnnnnnnnnnnnnnnnnnnnnnagatgggggggggggggggggggggggggggggggggtatgaatagcttcatgtttcaactttcaagctgttctcaatttggtactaggagatctgtcatagtaattcaggtattttaatttcctgccggtctaaaattggtaagagctagtcctaattaggctataaaaccattaaaatcaggcatccggctgttggccgctatacaccttcgtacaccgactctcttggcgccctatctagcatggacacgagcctctgtgaggcctgacggacaagccgacagttgcgagacaaattgttgaagatattcggggaatcaggaaagttcacgctctaacacggctctactaacactgcccagtaagcgtcacgtaacgagttatttcactttataactctccaatcttccaatttctttcacctcgcttactgatgggtcaatccgttattgctatgtttaagcaccaaggcctgtaatgcgaaattggatttctctatgcattcggactggcctcgctatggcaaatcttatcaatagataaataggtaggttgcattcttaactactaagatgctccttgaaccactcaagtgcttgcagaaacgcgctctgcatcgcgtatctcaccacggggctctcgtgatcgcctcgcaccgcaaagccatgcttgacaccaccatataggttcatttgccagggaaggttcaattcttttaagatagcctccgtctcctggcgcttctctgcgggaaatatggcatcaagctcggcggcagcaatggccagcgggccctttatgctttttaattcattcgcttcgacgtgcgatgggtgcgcagtgtacccaacgtcaatctttcccggaagtaggtgtcgaacgacatatttgccgccgaaacagtaccccacagctccgagtttctagtttatcctcagtaaatattgtcttcgacaactccaaaaatacgtaccttacaattaaagtttgtatgcatctctctgatgcaagtctcaacaataggatcgatatctatgggaagatgagcttttccttggggatggtattctcccattctccacttctgcatgtcgaattcgcctggtttgttcagcggtacagggtcaccgtgaaagaggtccggcatcataacaaaatagccattcgtcgcaaactggtcagcgatgagttgagcgtttgtgaaccggtggccaatgatgtccgtgagtctatccatcagatggtaagtaagcccagagtaatcggtatgaggccaaaatcgaggattatccgcacttacatcaggatcccattctccgttgacttgttaggagggtggctggtatagacctcgaatccatttagggttgtgatggtgcccagtggctttccataatgtttgcaccctcggtagcagcatgattgggatgggttggaagccattattggataaggaggcgagcactgaaggagtaatcgcacttttcgaatggatctttgccctcggctagcaattgcttttttgattcgagctttcactcaattcaggtgggaggtaccatttaaatattcacacagctagatttcccgatatcgttaatatgtccgaggctcgcacgaacgaaatgacaaagtttctttatcccgggtggtattttgcttcccggtgggaccctcagaaggcgatttgaaaatcataagcggaagcagctgttgggcctaaaaccctactttcggagttaaaagtatgagcattatcgaaccgaaattgttcggggatgaagataggtctctttgaatagtcgccgacgctggtaaaagtggggccgacggtttcccagggttcagataagtcggacttcgcttcccgaaccagccagcccgtttaaagccggaccgaacaacaagtcttccaaatggagcaagttcgtagacattaaatccggtgcagttgatatataattcaatatttgtccaacagatcaaacaggatcacttttttggatgacagcctcaaattttctaattgtgtggtatcgagtgacaatccaaatattttcgcaaacacccctcagcccatcttttgtttttgtctccaacttttcaggacggtggcccagtcggggcttgaagagatggcggcattgaaaaaagagctcgttactcccgataattggtcagaccgggatggtacgacccggtcgatactctccaaacttcgaatccggcacccagatcacgaagtggctcatacccaccgcctaggtcatttgaaaacggatagtgagcacctagtacagtttgacggatcgaacgatccatataaaccattgaactggagcttcaccaagaaaagcgtcaccaccgttctatacggctttatcacaatgggtaagttctcctcggttctttgattattatgttaggtaattgacatctctggcccttttttaggctctgcatgggctagctctgcgtaatttctatggatcttcctttttatctccatgctaacctaatgcagattctctcctgccatctcagacgttgataagcagtatcgaatctccaaggaagttggaaccctcggcgtttctttattcttgtttggagtcggactaggtcctctcttatgggccccctgttcggaagtttatggacgcaaagtcgcggttttagctccatacgcgattgctgtcgcactttcatttgccacagccgtctcgaaagatattcagtctatcatgattactcgtttcttcaccgggttttttggttccgcccctattacaaatgtgggtggtgttctggccgatatttggagttcacagagccgcgctattgcagtgacagtgtatgcactcaccctagtgtctgggacagtgattgcaccaattgtgggtggagcgattgaagtcacaaatcttgattggaggtggactgaatatgtaagtttgttccggtgtactcggcctaccaaaagcaatgtgttataactagatcgcagattactggaataattatggccctctcattaatattaggggccatcttcttggacgaaagttatccacctgtgctgttggtctacaagagccgccaacttcgtctacggtccggaaattgggcacttcacgcccaacatgaagaatgggatgtcactttaagcgagctatcaagcaaacatctggcacgaccatttcagttgttaatgacgccaatatgttttgctatcgctctatacgcctcttttgtctatggggttctctatctcagtttggcttcattcccgatcgagttccaagagctccgcggttggaatccgctagtcggggctttgccatttctaggtcttcttttcgggttcttccttggtgccgcagttaatataaccaaccagagattttacagtcaacgattccaagcgaacaacaatcgtcccgttcccgaagcccgactcccacctatgatgattggttcagtattttttgctgcgggcttgtttatattgggttggactagtgagccgcatatattctggtttggccccatctgcggtgctgtatcaacagggcttggcttcttcaccattttccaagccgcattgaattatctgattgacacattttctgaatactccgcgagtgctgttgcagtcaatactttcctacggagtatatttgccggctgttttccaatctttgcgaatgcgatgtttcataagctgggaacagcttgggcattcagtcttttgggatttgttgccgtcgctctcattccgattccatttgtattttatatatatggcccacagatcagagccagagacagatggtccaaaatatccgtttagcacctgatccgagaagtgaaattttaatccttgaaatagggtaaaagccgccatcatccatctgctgtagcgctcaactcatatcagcttcgagcgatgaacctgtcttgctcccaatcgctctcgtttactttgtcttgtcacaaaccaggtagattaccagaatggacaatgaaaaagtaaaggtctgatagaaaaagcgtgcggatatagtaaaatgtgcaacatagatatttgcataagcctccgcgagatggatcaactgtttgtcctataacggacgctgcagaattttgggttttccttagattgcaactagtttatgccaattgtttcacttgattactccttcccaagcttgcacgagacgagactttacttatttattttaggctgagcggtgagtaacctcggttgggacacctacccaaaaaaacaagtaaaatttcagaagcgccggaaacgccagtagcccaatttttcggagggatggagatcctacactaattccttctcgggtggactttcatggagttagagaaggtgagctaggcgagacaagctgagcgaatacaatccaaaccacgtgcaaagtagcatttctcagagcaatggtgacaacatccttgtggctagccagcatgtcattgaatttcgaaatgttttcacctctgattgtcaaagaaatgtaggcgccaaacgttgtacctcagcgttctaccgattttgagattatattatttccagttcttaacagactctgagttggaaattcaaaactttcagctcatgctggtattctgcggctacacgatgaacccagccaagaacctgacagacggcctgaagtcctttcttcaactttcgaacatcttttttgcttgtttgaaagtcatctatcacattgcgtggtgacaaaaagctctgcaaggcaaagccggcaaggagcagaatactcgtggtcacggagagagggtcgaccatgcttgttaaggctgaagctcagggaacaaattgatagagacataagaacaaataatgcttttttagattgaacgtaaatgatgacgacaagcagtgaatcaacattgtctacgactggcgttccgggaaaactatatgttccttcaattagcccagtgagcatggtcgtggtcctcgttttctccaatccaatttcttggagaaaaaaaagggggagccggctgggccggctggcaatggcccaatccctcaggaaattgcggcagcagggggcagtagcagaaactagaagagacagcatgaagtcagaccaagttagttaggatcgaaataggcacccaaattatcgatgctgttctaggcgaaattcgggataagcgtgaatctcggaggaaagacgcggacacgttaagtcggatttcggatataagcggtataccgagcaaaaagaccacaaatggggaagtgaactccgagggtggctgctgtattgagcgagactatataatatgatagattcctattgataggactgaaattgcctgccctttacagctctcaaatacgaacgagaaaatacctcggtcattgaaaatggggaagaacattcgtttgacctttgcatgcggtccttacgaccgtatggatcctctagctaacaaggctgtcgaccctgtcggaattgatctcaactacatcacgattaatcatccgcgggaaatctttgaccggatgatcagaggcatggagttcgatttatctgaaatgtccagctcggagtatgtttgccgatacgcggctggtgaacgagacttggttggcattccggtgtttccctcgagggctttccgccatagttgcatcgcggtcaactcagacattatctcaagcccatccgacctcaatggcaaaaggataggtgtccaggtgtacactatgaccgcagctgtttggattagaggggttctgcaggatgcaggagtcgatctatctacgattacttggattgaaggagacctagtcaaacctggttcccacggtcaacccaagacaaagccgctgctccgtccagtgtcccgagtcccaaatgaaagcccgaagtcgctcagtcaacttcttgaagagggtgagattgcagccacaattggcgctcacgctccgccatgcctcgcaaaagcatcccatattcgacatttgttcccgaatattcgcgaaaccgagaaagaatactaccagaggactggaatcttccctatcatgcatcttgtcgtcatcaagagagcggttgtggaaaagcatcctttcgtcccgcggagtttattccaggtaatgaatgagtccaaaaacattgctctgcgttcaatgagacttgcatcaacttatcggtatatgttgccgttcctctcatccgacctcgaagagatagaacaactatttggtggtgatccatggccttacggaatcgagtctaatcgcacagttttggaagcgctggtgaacttgctgtatgaccaagctatgatttctcgcaggatttcacttgaggagttatttccattcccttgtgaataagcagtctatgtaactagagagaattgtactaattcaaatccgtgaatgaggcgatttgggccgcagcaaggagaatagtagatggcagaaacgaatccaatggtagatcctagatgtccttacattgtcccccggataactgtcagggatatacatgaagcatacaggacggatggagatatgatctgcgggacccacatggtgtatatgggttcccctgaacgcgaggaagctacctttcctttgcttcctcgcgctacgtcttgtatctagaatagacaatagcttcctcaatattgatcattcaactacgtatacgtgagatcctcacaaggagcgcggcagctcctaggaccagtacatggtgtacaaggtaccgcgatcggcacaggtactaacgttcgcccgtatctgttgacttgtttcctgcatcgaagcggcgtctcgagaagatgtgctataatattctctaatacatatgtatacaactcccgggtttatcgaatagaagcatgattcggtagaccctagagaaacagcgaatacgcctaagggcttagagtaaaggtacagggattttcccctgcggtactatactcgggtcaggatttataatcgaaaatccatcccatgcgcgatatcctcaagctagccgtccagttccccgcgtggcggtcagggctgccacattctatcgtagctgttgacatctaccgcccaggattataggcagcgctagccacaggctatacagacggggttactggccgaggggagcatcccttcgtacacaagcagtcggcagcggcaacgaaaatggacaggcggcgagcagtccttcgctcaatttattcaggaacatatcgcgtgggttattcagttttagctttcgtgcgactgctaggataggcccaaacgcccgttatatcgagattgcggctcaccggcatctcacgagcccggcaaggtataggcagcaaggctaggcacgatggggtctagtaatggttcaggctggcgatgtcgataacggttttttgggggacatttcggtcgcgggcttgaccgtcagaatcgtttgcggcgagagcgctgcttcgaggacgaggaaggaggtaatagggtgatttgggcgggtcaagcagagtagactagtgatgcaaataaagcgaagttgctgaattggtcgacaacctaatacagttgggattttctcgggcaacttagcattctgcaagatgtatcctttgtagatggctcgagaaatcgcgtggagaggctcgcacgttctggactgagacgctcgggtcgcgtcgatgacgcgcctggtcgggattcacgtgacggggggttgtctgttgtctgtctccgcggactgaccaaatgagatcgaatttactagctgttcggttgcaattggatagggctggccggcctgatctgccatgtaaagtccaaaatgctgaaagctgagccagtcatgatgcacggaatgctgcacgcctgccctgaagggcgtacacgctgttcgggtctgtcctgaattgccgttcctcacagagattccggtctatctgctacctcgtccataatcacttctctcgtagctctccacgccgaccacagcgttctgtcatgtgatacccttatcgccaaacacagaaaatcctctatttttcaatcatgcaaaaaactgcgtgttgatttttggaatccttaattcgacttcagcagaatccaagctgaaccccttgcgtcacgtgatgaacttacggccgcggccgcaacgcgtactagagttttccggaattcgagaaggccatgatgcgccaattggaatgttgctctcttttccccttgccgctgctctcgcacgcctagaatccgctcgatatttcaagagacggcacgagttttgcttgagaccgcaggggaaaagatacacttttgtgcttggtccgccgatagttggcgcagggtgctgaagtcgaacacgctgattacaaccgtccgttttctcgtctgaactcttgcctgccgttgtaccagcctcagcctcgccgtcgcgtgtattccttgtaatggcagccgtcgcatgctctgaggcacgtgtcgggtggatgatcgtgggaacgaagagagtatcatctggcataccaggcttgacgtagtcatcgaagtcaacattgaagtggggacggtctgcaccgggactttatggagtctcgcagatcggcttgcttcgatcgcggatctttggacaaagtgcaagggcgtggatccgggcaaggacgtgcctccgatgcggtggaaatcagtgtcatcgtttaggccgtgcgtgttatgggacttcggtgaaaaagacgtatcagagaagcgaagaaagactgcccgcctgagatcgtgaggtggaggtcactcgacctcgtttcgctgaaaggagtcggggaaattcgctggcgttgagctgcttgtcataaggtaatatatcatattgtcggtgctcattgtcggctcaaatcgatggaaggtcgagtggtgtctcgaggacgtctcgatcgggagtggccaggcagatcgatcgcgtcgcgcggcaaggcggtgagggtttgcacgacgcgctgtacatgctcctactgggctctagttctagaaattggcagggacatttacaatggagttacattaaagtatgcgaaatcagaaataaaattaagcaggaattgcgtgtatatatactcggtactgagagaaagattcaaaatagtaccaggcaaagtagatgcgcgcgggaaccaaccacatccaccaaatacccgcatgtcaccgtatgtaaacttggttgagccctgaacgccctcccccatgggatagccctcggtccgccgtctactagggtatatgttcacctcctgctgggccattgctagaacgactggacggcgatccgaagaagtcgagacatgctggaagctcccgaataatagctgtggaatcgttgttggcttctgacgagatgggaattcaaggtcgggatccaccccgagcagctggcagatccggccgggtgtgatctggggcgggccccgcagtaccggcggccagggccggtggaatgagacccacagcgtgctgatgcgtgctccgggccgccgtgctccgggctgccgtgctccgggctgccgtgcaccgtcttgctcgtcgaggccggctagggaactgaaagttccctgctgcatcacggagggttccggcgtagccctcgacttgtttcgggctccgacactggctggacacgaggaagcgaccgggcagggaggagcctcgggatgggacgcagaaggcgaaggaggaggcagcggatcgacgggggcggctgggacgatcaggcgcgtctcgacgggccgaggaatcaacagtccgtgcggatcgatcacgcagcctatctcctccccctgctcggggcgcagcatggccgggactatatcgtcggtcggcatgtcgagcatggacaactcgttcagccggtcatgcgcactagtgatatccccggtaatcacgccgggccgccgcttctggccctgtttcccgtttgtgcagcgcaggaaggcgacccagttcacccagtggcagaattgtggccagtccacgactcgtgcggcgaggaaggcacactgcttggcaaaggtggtgccgtagccgatctgctgcaaccgcgcgacggcactccactcaaaccttttgtgtttctcagtctcgcgggcgcgatcgaccgcagtccggatgggcagccagaccgatttgtcgtccgcgctatacgtctcgaacatggccgtgcactcaaagatggcgaaccattccatgatggttgcgtcgagtgtctcggagagcttcacgaactgatcggcgtactccatgcagaggctgtactgctttgcggggttgccctcgagcttggtgaagctggttcggaaggtcgtgagcaagctcaggatcttcgccggcactcggggggaactgctagatgggagacggacagtacggtgctgggctcctctatgacgagtgggtgggctactcttctggtgatggttctcccctggactctctctgttgttctttttgctctctgtcagctacttcgagtttgcatcctgtgtcattctcacatctagtaaaggcaaaaaggtacgcaactctttcccaccagattatggggcctccgagatctcttctggtaatgggcttaacccggggggtgtggttgtgtatgagagtgtggtgggtggtgtgggtgttggttgggaagtgagagaagagagagaatattttcctcaaagagagagagggagggaaaaaagcccgacaggagagagtaatattcccctccaaatacattcatacaatacaacatcgaacttttgagtactcaacataacgagagagacaaggacaactccacggacaatatatcttaatacaccacaacccgagtccgaggtaggagaatctgtgcaaacagcttctaaagtagaaagtcattttgcttgtgtgtggtgagtatataagccgggccttttcattttgtccctttcttctgtcgagagggcaatcaccgggaaagagagagagagaaggtattagcctaggacgtatataagagaccacacacacacacatactccaaacaggccaaggcattctcacactctctcatctctctcatcccatcccactgttatcctctcggaccccacacgacgcagaggaaatacaaaagccaaatatcaacaagagttactcccccgtcgatgggtttcactgcgtgcgggtcaccaacaaaaaggtcgggtgccactcacgaccgtttcttttttggcgtgtgtggtcatgaaacggccagtcgacctcgggcattgcgacttcgaactctcccctctgaggcttcacttcagcgcaaccgcatacttcactgaggcagccactggaaccgggcccagcctcggccacacaacgatcagcttcagccaatggatagaccttcgaaccctctgggtgtcccaagcaccacagctggaactccgtctctttgtgagctttgatccgatgatcaaggccgccgaacccgcgtttgccaccgagctggtccgagaaatcggccttccagaggtaagcggctccctccgtcggtcactttcttgctcgcgctcaatcgtgcttcccgggggatgaggcccttccaagtgataaccctgagggtattaggtctggtccggcccaggtgctcacagcatgcctggcttcggtgaatatacatctcgaatatacgagctgcaataccacgccacagccagagaattgcctcgtacaaaagtccctggagctattgcgttgcggcctccggaaactgtttctatcgggcgcgcccccgagccatgatctcaggccactcggcaatgggaggctgcataagctaccctcactcgcgccggcagtctttgagccgaggtattgtgaggtgcgttatcaggggtagattatgatacaaccacggtacatatgctgatcggatatgaagggaatggagcaaagggctgtatcactcgctccaattacaacctccctcctctcaatgctcgagagtcatgaaaccttacagcagatgctcgtgatgagactggtaaggcccaccgaccgggatggatacgtaacaccggaatccgcatacggagacacaccggcgagcaaagccacagaccatttgggatgcctgataaaagtcacactgtggaagattgcccagcaccaactcgcgcgcctcaagacccgcaagacggctatgccatttttcaggttacccattgagctaccagagccgtcaatccatccggacgacgacgacgatatgcccccattgctcctgtcagaggaagaatttgattctgaagattctgaagatcgaggcgatggcgacgacgccaacggggatgatgacgatgacggtctgtgaggaaggaggagtgtgttgaagagagtaggtttggatgcggaggaaatgaacatctgcgccaactaggcagtaagaattgattgttggagactcaaggatttgaataacccctgatcgaaggagtactttgtactcaccccaataccactatctgcaagacaaaaacaatattgagcaatacagttctttcgcggtgaacaagcgtgattcctcaacagagtaatgtaagtggcctgccgaggtcgtaagtgactacatatatcatatgacaatgcagcaccaggggtctaagtttatcagatccgatgaattactaagctcttcttgctgggctccttgcggcataggtgacgctactaagaggagccattgaatcaattagcggctagtcaagagggttatattcgcacatttcctattctgtcgcttgtttctcctccaacaaccgcactcggtcgcggattgcaaacttccactccttcgctaccttatataccagcagcaatcctagtacgaagagagggctgaacgaggccacaattgccgtgacgctgatccagaccgccgcatccatcggccaagtggtgccagggtccactcccacagagacgacgacttgtaatccgctcagaaccatggaaaacaaaccgatcacaaacaagataggcccatagaaacgcacgaagtaggtcctatactggtactcggctctctggaagtccgacttgccgaggacaattgggccatagaaatttagccgcatcaaatgaatctcaccgtttacataacgcaaggagacatcccggtctgggatgccggctaggctcgacttgaactcgcaaaactgctcccaggtggtgtcccgcgggacaaggcacaagctagggtcctgcgcaatgcgcaagtcggactcgtgcagtcggtgaaggattctgcccaacccagcgatccaatcaaacatttgagctcatgatgttgctgaacgtctagggaagaagagagaggataccagagggacgcctaccatcggctggcccagcgaggcaaacggcggcggcctggaacctgctatctgggtaataggggcaacatgggcgatcatggtctatcaccgtatgggggctaatgcttgctacttctgtattcaaggagagcgtagtgtatcaagctgtgctggttcgttatgaaactcactaaagagtctaaaaatagaacatagaggctagcaatccataaaaaaaccccctaactaaccccggcaccgcggaattatgtaagttatcgagcgaaggaaccctgaaggtcagtttgactgactaatctcggatttggcggcagtaaaggcaagcagtacaccatcgcctagctcagcaacgcgaaaagagaaaataggaagatgcaagtcgtgtgagactcaaaagaaacagtggtcccactccgtaacaacggccgcgatagtcccaaaacgtctcctttcatcagcccctatggtctttcggaggtgtctggcctcaagcgacaccgctgcctgggaccaccgccttgacaacgtcagaaagggtcactgaactgcttccgattaggaacggtctgatcgatttccgacgagacaggatctgataggttctgccgttgtcgcctgactgatcgaaggaggatttttgcggtgcggatctcatctggtagaataaatccccccttgatcatagggttgggatggttgaggccaggaggaagatccgctgagttccgctggcattctccgtctggccagaccgtgatttttagttggaaattctgaaataagagtgggcggcacttttcatggacacggccaatgcacaacacgcttccagagaaaccccgcgcatcgacttgatcttcatcagttctccacagaatgctagcagaagaatcaacggcattctgaatccatatatgcccatggccctcgaggagagccgcccggatttgttcgttaggaatatccccgagcaggcggccgtgttcattattgatataatcgaagacacaagcaatcatcggtgctccctggatcgcgtctttatatgaagcccattctggcaccatctcaattcccttcggtgggtgaatatcaatcaggttatcgccggtaataagggaaaggtcgtgacggtagccggaggggtatggatacgtgctgcttgggtcatcatatgtccgcgtgataagtccgacctgtttcgttagaaagacttcattcaaggatgggtccgtactcaccctacggttggtgcccgctagccagcactgcttaccgattgggctcgaggaaagggggctaggcgtagtgctgacttcgacctcccgattctggagccgtagagggatttgaaaccgtgtgagagactgtgtgactcgcttgtaaaaagaggcaacgcgggtaaagaatgtagggggccctgggagtctcacaaaggcgtgggtagggacggtgatagcctccgtgtggtcaggaagccggatcttgaggcccaaaacgccacagacctcgtacgcattcgacatgcgcgcaagctgctgaccagactccgctgttgccgccgacggttgcattgccagaacggtatacccgactgtcagcctgccaacggtcggaggggtaccgaagttccatgtatgcaacatgtcatcccgacggctgaagaggataaccacacactcaacctggtagataaacgctccgatggacctcggaaatgccgctcttaggcacttaatgtcttctggcgtaaaagcctgccggacgtcgacgtctcggcggataggatccgaaatgatattgcaatactgcatgtcgtgatctactggagactcaaatgcaggttggatatggatttctcgaccgccagctttaatgaaaggcacatggctattttccggcaccacccaaatgtccttgcctgagtccttctgggtcaggacgcagacagctctctgagatgagaaagccgggtggtaggttcggaaaagttgctcattttcctgggtgatctgcggctcaataagagcgcgagcttcggctacagaacgagagccccacaaggtcgaggttgtccctagttaccaaggttagcaccatcgcaagttcataaccagcctcaaataaaactaatacccacgatggacctggcgtaactgtcgacctcggtattgaataatctgggaaaccggtcggggatgctcttgaacgcacgaatacgtcgccatggtcggtaacgtaaggaaaaggaggtgggtgaagcgatgagaaagggtagaaggaatctctcccctgcaccaacgggctatggacgaaaagttccacaactgctggcacgatatgttttctggtgctgaggagcggtgtatttgtcagtgaagggaaagcggcggggggtcattggagctgggtaaatcgggtcaatgagaagcttccaaccgaagaatgaagcaggagcaagtacgtagatatcacgacgaaagaggtctagcgcctgtcggaacagcagcataggtggatccccggaggcaggggatactatcttccgtcaagattagtcatgcatttgagcccatctacattgctagttgaggggcggtgtgggtgggcagaaaagcacagatataccctgcaccagcatgacccactgagcagtattccgattctcagctaaccattctacagccgccccgcgccatattgttacattttagctattactcttcatttcctaattatatatactcctactaggctctagttctagaaattggcagggatatttacaatgcagttacattagagtatacgaaatcagaaataaaattaagcaggaattgcgtgtatatatactcagtactgagagaaagattcaaaatggtattcagggcactcagggcggatattcacccacctgaatcttcagcccgtacagcaaaatttacattctcacttctgatcgaaatgctataagtaacctttcttttcccctccgcgttcatctctcaagcctcgctttgtcacgagcaagatgcgtaccaagcgtgactcaatgttgaataaccaccctcatttttttatctcccttgtaagtttataatctgcaagatgattatgatccgagtatccattgcctcacacgcgagaggccggccgccaaggtctatctgctacacaaatcagcacacccaagaacaattcggaagaaaaggataagacaattgacaacatgaaaaccgctggtttgaacttgaaatcaatgtttttatcggagtagaagaagaagaaggaggaggagctggatgctgctaatgtctcaatgagaaaagaactgaaagccgtcaaacctcgacttgaaagataggaagctttctttttctaacactcggtggttgattcggaatttgggtatcattgttgactgtatcggtcgagaccaggtgttacacctgccaatttcataaaaagaatacttgttgcgttgagcagaccggcccaactcagtatcatgcgggggtctaggatgtcttaccgcttgtagccaatgagagccgatacttacttccgtctgatttgcaacctgccaatcggattacggcgtgattcccttggtaggggggacggagatagaattagtagtatagagatagatgagccagagttgccagatacaattacgctattccgggcctctcagagaaagcgtaagagtagggtagatgatgatttatagctatactaggaaattgtattgagtttactttctcctgaaaattttactgaaaattttgccgagtcctgctataattacaatacgtattgttacaggcgaggatgtattacttgtgcatccgtgcagtaggggcctgtttgtcttgtttgccttagatttgggcccgaacaggggtccgaaagcccgcgcgggcccatgggctaggcccgtgacccgatcacggnnnnnnnnnnnnnnnnnnnnnnnnnnnnnnnnnnnnnnnnnnnnnnnnnnnnnnnnnnnnnnnnnnnnnnnnnnnnnnnnnnnnnnnnnnnnnnnnnnnnnnnnnnnnnnnnnnnnnnnnnnnnnnnnnnnnnnnnnnnnnnnnnnnncgccgcgggcacgcgcgcggggggggggccgggtcgggtcgggtcaaaacgggctttggagaagtctaggaacaagataagcagtccgaggggtagcttgatgacagacttcgaaaaaaaaagacaatcgagtgttcaatattcatttcattctgagcgccgtaatttcaaaaccaagtgtcatgatatttcacgttaataacagatacaaaaaagtagttgacgagactgaaccaagacaaggaggaaacttagtactgaaggagcggcagacatacccgaagtagtttagcgcggtgtgtgtcgcaagtaaaagagtgtgcgtagacgttctcttcctcgatcgtcaatctctcgcgatagttgcagtagaaatacgccagtctgatcgtactatcgtgccgtatgcgacgatttggatttcgccaatcacaccggaaatcatgagcgtctttccagtccctggggcactgggacagaaaagggtgcgccacattgtttgatcttgatcttgattggaccaagggacgaattcgttcggctcgaggaaccatcgcccggtaccgttgagccagagctttaacttatcgtcttgtttcattgcggtattggtaggagagatccacttcatgagatcaagtcggtccttctgattgagatgctgtactatctgctcgattcctttctgattcaagactgttatgtctttggtttcttggataacttggctagtcataaaaaataaggtcaaatcttggaccctttccccaacttggtatcgaagttctctcactgccgtttggtcctatacaaaacgcttccaaaatagcttcattgcggcgcgaaaattgtttgtgttgatattaaattccccataatcgtccagtttcttccggatatccctcagtaagagttagcatcttttgaaatgtcatgcagagtatggttttgttgctcactcaaatgatggtcataatgctgatcagccagattgaaacatatttgacaatgtttcgactctgtttcgactctgtttcgactctgttttgtcgtcagcaactataatatcggctgtactagaaagctggatatctcactcctcaaaaatgatcctgtactgcaacggtgcatctttgaattgtttccgcagctcattcgcaagtttgaggaaagtatacatgtcacccgcaccatacccaaaattctttctagtggcagaatgtaaaggtatacgttatgcgggtgtaaggcctgtccactgggtaagatacaataggctttgtgggaggaacacaatgtattgatgttgtgaatgtattgatgttgtgccacttgccagtctcgagggggtcccgaactataaggaaatattaagcaaagaagcaaacacataatggcaaataatctatggaattcaaaccgataaaccatgcaggcagtaagcgagcaagcaaacatcaagcatataatagcgatctatcgtatattgtgacaagagctagcaaaccacctgaaaaagatgagataattgaatttgcatggtgccaaatgcttcatgatcatggggtcatcgggcctggttaatctgtcaaggaccctgcgcactatgcccctttgtaatacattcttagatagcttcgtaggatcgatgatagcgtaaatacttgtccaaacaccgaacgccttgcttcccctcccccaattcataacatttggaggatcatcagttcatatcataacatgatcccctgcaccattcatcaccattaaacatcgtcactcactagcaactccggtgggccggaaaactcgatgcagatacaatcaccgcaatcgctaccgcctgtgtttcttcgatcagaccagattgatgcaattcgaagttgaaagacttaccgtggccatatccatgcctggcataatcaccatatccatggcaggtcgatatcccgcctggcagaaggacaacaacgctaactttttattatgccgaatactctctttgatttccataatcctacgattgtcatccaccacgtcatacatcgtcagaacccggccatggctttcgaggtcgatgggcaaattgcgttccttcacgttgcaatctacctgtatcaagttctcgagctccagatgcagatctccgccgagactgtgccgaccgatggcgatgggggtcgtccggcaaccgggaagggatacggtccatgtattgcgtacccagcgcgatcgttggtggatttcgaacaagggtagacctgactgatctcgcacctcccgacaataatgcgggctacatcttcgcccacttacggtgaagagaacggcgccattttcatcttggatggaataggcgcattcggagacggcactgccgcctgggtatagggtgagatgcgtcttctgctctgtcatgtattcaaaacgcaggccgattgggcgcagaggctctttggcaggcttgcgaatatttttgttacgatttctcgtggggaatgaggcaacggatacttccgatgtttcgcttgcgattcgcgtgggcttcgacatggtcgttgttgttaaacggaatcgagacaattcagaccgagtccatccccgtcaagctttctgaaatgatatttggacacagatagaatcgtagaggtcgccctcctgtgggcctctgactgagtacctcgacggactaaacacttccgaccgccgtgtcagcaggaatgtagcaggttgccgtggaatggagaaacccgatttgaaccgtcgcagtcgaacggggcctagatttgtgcaaaagtgcagtttttctgtatggaggaaggactacacttcatccgagtcgtgagaagttcacctcggcaagctcatgatatcatgatgtttggtcccgacccccactgtaccagcagcctctccatcctattcaagattttgatcaatcatgttcaaaacagaaaatggtcgaaagtcaatcaggtctcgtatgacatcagtcagatcaagcccaagtctagccccaaggaagggcgggaatatcctggaagttttattcgtgagatcatctaaagcagtggcagatacaatatagtatagtttattttaagttctttcgcctgattggctggggaacagggggttctccaccagaccggctacttcggatcttcagatgtgcagatgtgtgggggtcatattcaccacggaaggattggcacggaagaatcggcatggcatgctctgctagcctcactgaattcgtgatcgaccttacgagattgacagactcattgggatttcaaaatcaaaatattcggttgatattaggcgcagcgcaagctgaagcatggagaattagatacaatttggtacgcaatattagaaatttcctcagcaaggcacctccctcaatccttaatctccgtaatctcccatttcgcgcgctcttccctccgatccttcacgaccttttgtataatgagggcgagaattccaacacccacgacaaagacaatgcaaaacacgagaataggcccgggttctcgcgaggcccaattgcgcctaacgagctcatcgcggacttcgatacccctcgcgggggaaggatgaatggcagccatctggtgatgcagtttttgagagcaacgaactgagttgagctagatccagctccgacaagtcagaaatccaacggtgtgccatggttgaaaacatgatcatgatctagtctgacttacatggagggtgggtggtcgtaaatatcagagatcagaggtgttgagcagtctgtgggagagtgctcgaaagaaggtgttcaacaaggaagatctagggttgaagagatggcaaaggagcaggcaatagttaacaaaaaccctggagcagactcttgctagaattcaatgcggaagaagttgtctatagcttttccggttctctgacttctgtgacgacatgagaagggctcggcttgcgactttgtcaatatcaatcctgattattgatacggagtactgagcttagatatcgcctgatgttacccacatctgaatatacgacgaatagggtaaaccggatgcttcaaatctttccattctcggcgtcattatcatctctctgcaccggcatgaacggaccggtctatgacatcaagacgaaagcttcttttcgtttgggaaagctcggattgccaggtcagtcaggtccacctcgagcctctacctcatatagtccagcctctgtcgttttaaatcctactcaataatcacttcgtgagaggatcactgtagcgagtgaaaaataaaatccctctctccccttccgttcccctgtcgtcgctgctctcgtgcccccacgagacctgttttggagaatgtcgtctgtatccaatcccaaccgcgacgtcgaaaatgacgctgcggagcgccgattctctgctatttcctataaggaggatgtgaagatcgatgaatacacgcgcctggtgcgatggatgtccacctaccgtgatacgaaatgggaccaggcagatgaaggcgaaattcgcgagagtcgcgtgtggtttgcgccatggcggaagagaaagttccgttggaagtatatcggcgtcggacaggagttccccgatgactggaagttcaccgacatcaatcacggtctgtcggactcggaagtcgaggagaggcgaaaggtgaccggattcaatgaattgacggcggagaaagtcgatcaattccgcaaaatcttgggatacttccaaggtccaattctatatggtgagagactatcgcgtccccgccgattgaacgcagacagtgacacactaaccggacctcgacagtcatggagattgcagttttgctcgctgccggtttggccgaatggattgactttggtgtcatcattggcattctctgtctgaacgctgcagtcggatggtaccaagagaagcaggccgaggacgtggtggccagcctgaaggccgatattgcaatgcgcagcacggttgttcgcaatggaacggaaatcgatatcttggcccgcgacctggtccctggcgacgtggtaagatgagttccctatcctcttgactatttacctctattaacacatcttgtcatattcagattgtcattgaagaggcgaactcggtccccgccgatgccaaagtggtctgcgactaccaagagaaagagacaggctggcagaattatcagcaaatgcggcaagaaggcaagctggacaagaagaagaagaaagcaactgaggatgatgaatcgtcggaagaggatgaacacaaggacttccccgttctggcctgcgatcactccgcaattactggagagtctctcgctgtggaccgctatgccggtgacgacgtgttttacacgactggatgcaaacgaggcaaggcctatgccattgttcaatcgactggaatcaagacctttgtgggtcgcacagcggcgatggttcaacaaggtggctccgggacaggacatttccagatggtcatggacgggattggtacggctcttctggtgcttgtgatggcatggatcttgatcatgtggatcggaggcttcttccgcaacctgcccattgcctctcccggtcaacagaccctcctacactttaccctttctctgttcatcattggtgtgcccgtcgggctgcctgttgtcacgaccaccactctagccgtcggtgcggcttatttggccaagaagaaagcgatcgtccagaagcttacggcaatcgagtctttggctgtaagtattccatcccgagtttctctcacgaccgattttcaagccgatcactgacgccgactagggcgtggacatcctctgttctgataaaacaggaacattgaccgccaataagctcagtatccaggagccatacgtcgccgagggcgttgatgtgaactggttatttgcggttgccattctagcttcttctcacaatgtccgttctttggatccgatcgataaggttacaatcttgtctgcaaacaaatatccgaaagcgaaggaaatcttgcgccaaccgtggaaaaccctaagcttcaccccatttgatccagtgtcgaagcggattgtgtcggttgtgaccctaaatggcgagcggtatacctgcaccaagggagcgccaaaggcagtgcttcagttgacaaactgtgatgaatcggtagccacgttatatcgacagcaggcgacggattttgctcgccgtggctttcgatcacttggtgtcgccgtccagaagggtaacgaaccatggaccttattgggaatgctaccgatgttcgatccgccccgggatgataccgctcagacgattttagaggcccaaaatcttggaatcgcagttaagatgctgactggcgacgcgattgctatcgccaaggagacttgcaaaatgcttgcgttaggaacgaaagtctacaactccgaaagactcatcggtggtggtcttagcggtgcgatggcaagtgaattatgtgagaaggcggacggattcgccgaggttttcccagagcacaaataccaggtagtcgagatgctacaagatattggtcatcttacagctatgacgggtgacggtgtcaacgatgccccatcgctgaagaaagccgactgtggtattgcggtggaaggcgcatcggaagcagctcagtctgccgcggacattgttttcctcgagccagggctatctactatcattgattctatcaaggttcgatccactcaactcatcaatttctgcacattgatcactaacttgctgctagttggcgcgtcaaatttttcaacgtatgaaatcgtatattcagtatcgcattgcactctgcattcacctcgaagtctatctggtcactagcatgatcattatcaaggaaagcatccgcactgatttagtcgtgttcctcgcactatttgccgaccttgcgacggtcgcggtggcttacgacaacgcatccttcgagcgccgacctgtccaatggcaattgccgaagatctgggtcatctctgtcatcctcggtgtcctcttagcactcgggacgtgggtgatccgcgcaacgatgttcctgccgaacggtggattcttccagaattggggctcaatccaagagattttgttcttggaggtcgcattgacggaaaactggctcatctttgtgacgcgtggaggcaacacttggccctccctgcctctgatcattgctatcctcggtgtggatgcactcgcaacttgcttctgtttgtttgggtggttctcgaaccaggatatgataaccgatccctttgatcaatatatcaataaggagaccagcaatggtttcacaaacgttgtcgatgtcgtccgctgttgggggtacagcattggtgtgactgtggtgctcgccctcgtctacttcatcttgaacaagtggaaatggctcgaagacttgggtcgcaccaagaagagcaaaggcgatattgccattggaactatcctcagtcacctgtccactatgagcctccaatacgaaaaggacgcggcgaatcatgggcgaatttggctcggcactaccaaggaggatgagatggaataagcctcaacttctttagaaagacatcattttgtggttcttgttggtggcagcgcggttgattggggagagtgtggtcatatggattcatgggcatttgtcttacgatgaccatcgaccgtgcaattttctattaatcagaagtggtttccaccacttccctaattcactaataatctctcttgacattttggcaatacaacggctgactcgtgtcaccatttacattcctttccgttttgccttaccctgatgcttataagttagatgcaactgtttgccattctctgtactagttatattttgctgcacttcactcgctgcctcatcgtttatatagaccattttgtcttgcgacagctgtgatgcaattggaaaaaaattacggggtcacctttgctcagctgtatgcgtgaaaccctgccatcggcgatgaccgtcaatctcttttgcaaggttatgcgatttgtattgcctccactacgactatcacaaccaccgctgcgccgacacaggcgggaatgaccccttcttgtacataacaatacacggtcaagtccggcgatgggtgtgctgcgattgaaagtacacagactgtcacttttgcccagctttgtgcttggagcgacgccatcggtgacgatttccagtatctttcacttggttacgccgtctgtgccgccatcaagttcacttccccaaccacgacatcgactgcggcaccgacaggaactacgaccagcgtatcttgtagtgaacaatacactgttcttcaaagtgactcatctgctgtgattgaatccaaatagtaagatactgttggtccaaatatagcatcagttttgccggattcaacaagcggttctaaatgatgcattctgacgttctcattgttgccctatgcagtttgcgccaagacacgagttgagagactagtgtaggaagtgcgactttataagttcgagttgcgatgcgtaactatttagtgaagccttaataactaccaacattactaagcatcacgttttgtttagctatgtaatcgtggatcacgcgggataagatgacgacaacgattcgactttccttatttgctgttgcactctatgcatcatgcaagttcagcagcgcgttcttcgcatagtagcagacccgaatcactttttctctaaccagagcccgagttcctttgaccagctaaaccttggttgataactcccaaacatgtcttggtatctcaacgcctggattattgagaggactgatcagtctaccagcagcccgttttcccacagagatgtggaagacacacgaactcattcatctctcccaccaaacgcacactcacaattgaaggtcttggtcgccttttccacaataaagcgcttagatactatttcgagaataaggtaagagaacgccctgctactcaagcctgccacaaaaccgcatcagcaacagagtcattttctacattcttaaactcggcatcatcattgtcatggttcctagtagaaatgcagccaaagcggacaattgcccgtgaaggctcgagcatgcggcctttggttgcctatgaaagtgtatttattggctcctctataacacaaactacctgcaaagtccttctctggccgaaatcctacacctaaagttggctgtacagcatagctgtctcatgcataagaccatgattagccagcctgccccaggtcagcacaccactcttttgctgaatttcctcgattccaaactaacgatctgaattacggggttaaatctttgcattcttcgagatgactacgacgactcgctcagcctgtgacaaatatgcgagtgagcatctcggtggctatgtgatgcattctgaggagatcactgtcgccccatgcagtttgtagacctctccgtgcggcattcctttccctttctctttcttcctctggaagataacttgccggcaaacgcgcagcttgccgcgtcggcgttctctttgtatgtctgcagagatgcttctctcatgttctggtggatggaatctggcttgctttgtggtgggaagctatatagacaggcttcagtacagtagctagtttcagatcttccatcaacatcatcttttgccatctggttgatcacttcttccctcgtagtcaaaacctctcaccaccatgtcgttccagtcgacgtgcaagctacaccgtggattacgagccgagaaacaacgcgtgtcttttagtccagcaaagcgatgcttggtcaatacatcaccgagcttgacgaggcggtcccaaatgcggagggcatcgaaaatcccatattgaagcttactaccatacaaatctctaaaatctctagtttgtaggcgttgaagctctcgcaatttcaaaacattctcatcgattcaactgcatcttaaccgcatatatcatcatatatcctcatcgtcatctgtcattatcgattccaatacccctgaccgtctatcgcccacgaataatctcgaccttcacaaacgtgagatgcttcatcttctctccacccagacaacgcatcattcgtaaagcattaatgtcttgggcttgaaaaaaattgaagaattcaagatcaaccatcacggattcgagactcgaaattcctgccaaaatttcaagtatactgttcctcctttactgagatctgtctgggtaagcatcgtacagcccgtcagcaacgcgaatgttgctgaaagatacttcaccctccccattctggaagaaccgaatcccagtcgagttctgataccaaggccttccgtcgagttagtttacgttctgtggaaatgtgaaaccaaggggataagggaaacataccggacccaggtagacagcacaaagcgagagttggcatatacctccaggacagagttgtcgaccaaaatggtcaggctgagagtctcgatgcgatcctcgcagaccccattcgatgaggagttgtgggcatgactttccgatgaaatttcggacttgcatttagtcgaataaggttcaccatgcttacccttgtgaccacacccgtggccgccatggccacaatggccgcaatcggcgccacagcagtcattgatgtcaaatagacgaagacgccccgactccggtgacttgtcgatgccggtggttgtgtttgcagcagcactcgtttcagaacgatcaatcatgatggactcgttggagaactgataataaacggtggttgactccaaatcggatgccaggatctggaaaccggcttgcaggtcggacgaacgtgcaaggaagtcgatctcagcctcaagaataaagaactttgtttccggggagcgaccgaacgggattatacccgaacttgtaagagtttggtctggctcagtgaagctaggggcagccttcatagcgttgtacggctcccgcgcgatgtcgattccgagtgtttccagtttgacgcatttgcccgtggagggtgaggaagcggccaaacgccacgagccaatctcattcacaagacggttgttgaccacgttcgggatggctttgatgtacaactcgcgcgacgtcaacaatgtgttttgccatccttgttgctccgatgggaagcccacaactcctccgaaaacatccccagtcaaccatacatagcttataaaacgatccggggcaccgctagcggtagacgcttgggaggacgcgggtaggactttgcctgctgctgcataggccgccaagccccagtcaaggacacccaccatatcagggacgaatgtcacgttttcaccctcgggaattgagattgaccctgctgcccaaagctgtgcatgtagcgaggagattgagggctgaatgggcacgtatgagctctctactgcaatggtcatgaaaggactgccgttgtggctgtatccttctctgtcgaggccgaagacgttgctagtctcaaaattgtagccgaatacttttgaccagtcaccattgccccatgttgagttggccggttcatggtaccattctccaagatactcccactgctcaaagtcggggctagtgttctggtagaggaacaggccaggtccaatctccttgaccccgcctgaaacgattgtgtaccaagtaccatctgtgttgccaaggatttcgtcgagtggtccattttgaaaaacaaaagggtcgcggaaagccgttacatccaggccctctgggggttctgggataacaggtggaatttctagcttggagaagttttgtccaccgtcgtaggtgaccgccagagactgcgattcgcttcctcggatataaggaagcgtccaatggattggcaatgccgagaccgaggtgtataaaagtgtcggttcgccgtcaactccagatgggatgaccgaaccatcgaaaacggcaagggggtcattgggaccgccagctacgattgaatagccaccattagggttgacatcgtagaaatggactaaatcatccgtcagaacaccggcgatcccggtaccattgtggagaaacccgacgtggaagagccctgtttcaggatcattatagtgcgcgcatgggtcgccgatctggccgttgggtggcagcacatgggtatgcggcctccaagtctcaaacaaagacagcgggggtagatccgcgagattcggaggtggagcattgtagtcttgagcagtggctcccgccgagatcgagatcaaaactgctgctaccttgatgatattcatgacgaggaaagttagatgagaaaatacctgcgaggaatgaagaactcgttgtacatgaatcgaactgatatttatattctacaagagggcgattttgtctcatcaattatgcaatttaatcacaagagaaatagcgcacattctaatttcaacgacagtgagggggtagccatacatccccatactggggtgatcctagaatgtaaacgaactccccgacaaatttcattttttgggggtagccatacatgtgcatactgagggatcctagaatgcaaacgaactctccaatgctttcattcttcggggggtttaaatgagtggcttgtgtaatctcgccgagacaacaacaatacttagatgtaacgacctatataagcaaagcgaaaggaatgcgagcataccttgcttgatgtatcatattcctcctagagcgacacgaaggtagtattgtcacattcctcctaagatggcaattctaaattatactgttgatatgaggcttacattcaatcatgtacgtgccccggatcagccagactatatcgtatattaatgcgaagcgtcaacttggagtatttgcagaaaatctccctaggctcaagaagaaatctcaatttaccatcatgatcccactccccttggcctacattctgagtccaaatgcaaatactctccggtaaagtcactagtagactcactacaacccgccgctgttgataaatatggagatattgtccgagatcacagttctatagctccaacttgtgttgattatggtctgacaggaaaacacatgtgacaacaccaacatagctctgtttctctggttctcttctgtccatcgatcatccaggaaaatatgcgtattgtttcttcctttcattccgtaatttcaatattagagatcctgcaccttcctttctagttcttacccattgccatatgccaatactctcggcgcgcattcttaattcgactgggtatgaaaaaggctggtgggcgaagttaggcagactatactaacaccttggtggttcttcatgccagggaaccgaaagaagcagagatatgcattagggaaagaaatttctagatccactagtcgtagaacatgcacaacgagatatcatgatattcgaaagctcattccttatgcgttttcaaatcctcgttcgaaaatggaatcagctgaggtgtgagatctggggccctatggaactttttgtcaaagggccacattggacgggggatgcgacgatgcccaagacgctgtagatcttgatcaacaccaccaggagtcaaaccaagcatccagtctgccgccatattaaacagctctggttctagatagccaatcttgactatgacgatatctgatgttcgaggattaaggtcaagaccgttaaagtcactctcatggtgatatggcttgcggaatttggtcaggatagtaaacacacttccaacctgtagcactgcttcgacttcggcatcacgatctccatacctgatggaatgaacacgtccagtcatggtgacaggcccagagtggagattgtccacctgtgccccggcggttaccgtcaccgtggcacccacgccagccttggttataacgtcaattgcttggggtcctggaatactagcatagatcacagatgagcttgattctttagaaaactctgatcgcttgagcagttgatccaagccgaaggtcacgtcgcctgatccaccagcggtaggattatctcctgaatcagagatgaagaaaggcctcttcgaggatgcgagcgcgttgtcaatgcactcggagaaagacccggtcggcgcaacgaaacggaagtctttatggacttgccagaacaaagacgcaagtctcttcgctcccctagcaacagcaaccttattccatccagtgaccattactacagcgtgatttcgtggctcatctgcccacgcatagccaacccatatggctgcatcgaggacatcatccatcgcttcgatctcgggaatgagcgaatacaggcttttagctggttcgttgcgagtcgaagtctgctctcctggcagcaagataggaattgggacccatgctttcaggggtctattccttctcccagtgtcggtttgcgcagtcaaaacatggaccagattgcgacaagcccgctctttgctctccaattcatcctcatgaggtgccatacgataacaagtgatcagatcagtctggtgggccagctctcgggacacattcccatgcaaatccatagatgccgagaccaaaacatctggaccaataacagtccgaatccgccgaagaagctctccttccacatcttctatatcctcaacacacattgcgccatgaatatcgtaccataatccgtcaatggggtttgaagcgacaattccagccaaccgctccagtatttccctggaaagttgttcgaaatcagctcgaaccacgattccacctggaagggcatggcctatgagtgcccccttccaatctgcggcgtctgctagatgagtgccatgatgcagaaatgcgtattcctcgatcacctccgggccacggcgcgggtgaaacgccccaccgagtgttcgagcgggggaaaagctagaggtctcacaagcaaggcctgcgattgcgataactggtcgttgagacatgattcgcggagggtgaagaaattgtgccaattgtacgaagtgtaagaaacgtaaggatgggaagatgaagtaatgttacaggatccaagacaatcgcgtcagactgcttttccccgctctggtgacaagaccatgaggtgaggaaagagcgacattgctgcgcctgtctgatattcatatctaaagagacaagggatcaaaattcaaaatataaaagacctagccactgagtaaatagtacaaaggtagtgggcacggttgtaacatctccaatcaggtgacgcgcgggcagtcgcacaaaagcgcgtcttcccacttgtttccgtcctctccataccaaccaatctaagtcatgagtcaagctaatattacacaaagaccaatcctagagattgcgtgcttcaatcaagaatcggccgcagttgctgcgagagcaggagcggaccgcatcgagtgagtatcttattcatgttcaagctcccggcaacatgcatcctgaatttgttttccttgttgctagatatccctacgttctatcactaattgcagccaaggttatgcaaggactaccacctcggtgggctatcgcccgacacagacaccctcgaacttttgaaatcacagctcgcgataccgatctacacgatggtaagaccacacgcggaaggcttctgttacgacgaatttgactttgaggtgatgaaacgaacgctcaattctctgaagtcctacggggctgacggtttcgtcttcggtattctgaatcgatccccacaaaagccctttgatccgaaaatgtcgtggatcgatgtatcccgtaacaggcagcttgtcgaactagcggacgggcggccctgtacctttcatcgcgcctttgatctcattcccgaatcccactgggagagtgcattggccgacatcatggaatgtgggttcgcttcgattttaaccaacggcggtgcttcggggacaaaagcaaccgactgtgtcgataagctgcaagctctggtccgttatcaaacgcaaccacaggggaaaataaaacttcgaagcaatatagttccagaaatcattgttggcggtggtgtgagggcatcgaatataggcttgctccacagcgtcactggtgcctcggtcttccactccgctgctcttctgggatcggaagaggtaacctgcgcaaatgaggtgtttaagatgaaagataagatatcacgggtatcggaggcagatgaaatggcgcaataatacttccacgtattttgtctgctttatataccgaacataaacccgagcaccatttggtcagaagtgtatgccattttcccaaacgtcttgcagcatttttggcctttgatttgtataattaacatgatgaggagaaaaggaatgcagaggcagcggtagaaatccaagcatcgagggcaagttggttacaacatccatcttatttgtcttcagattttcgatctcggatatgctgtttaccattgtaatcggttatccggctgttccaatgcctccttttcaggtcctgggtgaaatttggctggggttattgcctcaagcaacttgtttccgaatagtccaaaagccgaagcaatcccaccaaatcggaagatctcgctttccatttgactcagcttgaatccgaacgtcttgtcggcgactttgatgattcgtgaactcaaatcgatggagattgacactccatcattcacaagctgaaagaaggattcatcttccattgtgatacccaggagcccgagacttggcatattgcgttgaaagatgaacgaaaacgacttggctatgacacattgaacaccgcaccctagaagaaacccgtggtcagaaaacagacattcgtttcaatggcatcgaacctaacttacctaacagtgccatcactgcttgttcgcgggatgatccgcaaccaaagcccttaccaccaacaacaatgttgaaaccctgctgggctcgttcgcggaatgttggatatctatacaccaggcagcacatgccagcgtccatgttactttttatgccaatcagaaactcagcaggagccaactttaaaaccatcagctctggcatttgacgaatctaatgaaagaataaacactcactgcatccgtgtcgatgaagtctcccagtttctgcactttgccttgaagacttttgacttgtctttctccgtctttatctagccgcatgttctctatgtgcttctgtgtctgggtcgtggcactaggataaccacgagaaccacatggctcaacatatgccaggtcgctcttcgagttggttgtattcaagtgtatacgtgttgttctgagccgctcccattgacttaaatcgatcgacgcaatcagatcactagggtcaactagcttcatttcaaaggaggatgctgcgacagtggctgcagaggcgagatgaccaattgaacctaaatcggatgatctcaattgaccgtgccatgttattgaagagtgttcattacctttacccatccggttttcgaagttgcgattctgcgaggaaatccatacctctcctggcgcggcctggtcggctgacatcccgacacaatagctgcatccagggatgccaacctcaaatcctgcgtctgcgtatatatcacataaccccagttcacgtaagcgatacaatattggcattgaaccgggaacgaccttcctcttcccctttgcggtaggctttaatccccttttcattgcttgttcgattaccagagcaccgaggatgagatcttcctccgtggtagtgcaggcaccgataaaacatccattcagctccattccctcttcttccgtaactggaaccacgtcatccggctttggataacgtgcgatgaaagactccacttttgaaaggtcaatctcatgaactgcggcgtactccgcatcggtatcgggcctgaaatatgccgtgtggcatttatgacgcgtaagttttcgtctactaatgaaatcgtgggtaatttcatccggcacaaataaaccagtgatcccgccaagttcctgtcattcatgttagtgaatttgacccaactgatttatggtttgtgacataactgtggtcatgtttgaaactgcgaagcgggtgtcaagggacaaatgcctgagtgctggacctgtgaactccacaattctgtcggatgctgtagtattccgtttgagcacttggaggatgtataaaatgatatctttgcccccaatccctggcttcggttctccaaccaggcgtatattgatggtttcagggactttgaaccatgtttccccagttactaatggaaaggtgacatccgcagcgccgagtccaaccgcgagacagcctactgccccggaggaacatgtgtgtgagtctgagccaacgaccagcattccgggttgcgcgcgctctcggtagaattcagtgtggagaatagtgtacttcataggcgtgattcagcgattggaaaccccccgacgaaaagagaactgacattgatgccttggtattccgtcattttgaaggttttcttcgctctctcgcttacaccgatcagcgcctgcacttgaggtaattcattaatccggggatcaacaatatggtccccagaaagccagaagcgatcgtttcggaataccccgggttttcctagcagattataggtcgtttccattcccttgagattcacaatcagcccgcagctcacagtggctctagaagcgaacctactgcccaagacacctcagaggcaagtatccaatcaacgtggacacgaattatatctcctggagccacccatccgatgtgatttaaatcatgcatcgcaaatattttctcactcacagtcatccctcggcgaccttcgggcctgtgtgttagaaggcaaggcattgatttttctcggtcggctgaattcagggattcgagccacgcatccacaagaaagaatatttccgattgttgttgtattgtcagagaatcaggctggtttattcctaggcccccaagcatggctggctggtagcagatgccaaggacatcggtcaggacatcgacctcccgttgcttcgtatgatcggtgcggagaatcgttgagatatacaccaggttttgcaacgcattgtgtgtggaatgggatgtctctaaaagccccattgtcctactcagaacaggcggctcagaggggatcaagcatactgaccatttacatgtatatgtattccgcgagtctgttctaaaatatgaaccaattgattgagacttgattggttgctttcaggcatcgttcatgatagatactttccaaggtttggtctggtggtcttgaaggggctaaccggtcttaatattcatctagcaaggttatacagaggttgtacagtagaacaatatagtgatgcacggattactcggtcttacaccgctcgaaagcgggtactgcaacaccgaagggatttgacttgcagatgccaccgagtagaacatacgggcgcatgcatgccaatctccaatgctacctttatggcagggtccaagatttgccgcgtaatcctctacgggagcatagcacaactcgtctcgtgatctaaccaatatagaccgcggggtcctcaacagaaggtgcctattgaaccagttgagtagtcaagtctgacattcataaatagggtaacgggcaaggtgaggtatttaatttggactcgacctatcattatacgagtccgaaagtatccccaatcctcccaatctatacgaagtactctccgtacatacagcacaaagatatccttgtatgtacatatttacatcatgcatcgtgccgttgaccaatgatacatgagtacacactagtacccgttgacggaagtacatgattcatataaccagccaatagcagatcccgcggggagctgatggttcttccgtgtggggaaccataacgccaaggtttcaagtcccatggttgacgaagttaggcaagccacgagagataatttgccgtatccgcggccaatcagcaatctccttgtgggctccacgggtttttaatatgatcctgaacccgtggacctcttcagggttccaacactttattattctcttctctctctttattctacgtccacatacaactgttgtatattgtcctcctcacgccttttgcttatcaaaacagaacattatagagagagagaagcaatatggaggccatcgctgtggatccagacttgtacgcccctgagagttcttatagccccgatgactggcagtcgtgagtttgcatgtgattatccatcttgtacttcagattttcctcacgcgtcattagggaaactacctcgattgggtcgtcaatctatcgtggtttgatggataatgggagacggtaagagcttcacagattggatcacatgatgatctcacataacctcacactcctatagatatcaatcgctctccaacaaagaatactggtaggtagttggaattactcacaataagaataaactcatctcaaatgtagtattccatccgatgagcaacagtttgagacctacgaggcagggtacgtattgcaatcccagtccagagccggcctctaactatcgcggcagacacctcgtggatctcattatggactcagatcgagccaatccactgtttcggtcacccatcgggaccgaccgagaacgcccgctacaggttctcgatattggaaccggaaagggaacttgggccatgtacgtctgtagaccgttccgacctcggtgaaaatgtttagggcttatcattcctagcgatgtcgctgatatgttcccaaatgccactgtccgaggggtcgaccttttcccacctccggttacctggatgccacccaattgcgtcatcgaggtcgacgatgtgctgcaagagtggacatggcgcgaacaatttgatctgatccatatgcgcaatatgatcggatcgtttgactctgctgagtgggacattgtttaccagcactgctttgagtaggttatcaatacaacaaagtgtccggcccaatctgactgcataacagcaaaatggcccctggcgggtggatcgagcagatcgaggccggcccttttatcacaagtgacgatgggagtctcccagccgacagtgccttgtcctcgtggggtccaattatacaaaagtgcggtgatcgcgctggtcgctcttgcgatgtcgtccttaccatgtcggatagcatcaagaacgcaggttttgtggatgtgcatgaaaaaatctacaaatggccaattgggccatggcccagagaccaaaagttcaaggaggcaggcgtggtcaattgccaacactggatgtctggtatggaaggatggtgtatgtggctgctaacgaaatttggtgatcccgagccgtggactaaggagcaagttcatgtatactgtgccaagatacgcagtgaactcaaggacccacactaccatgcgtatcacaaagcgtaagttctgatctgtcatcgctcgcgtcgctcacaggccaaactgaccaccagtataggagaagagtgtgggctcgcaagccgatgcctggtgaagtcccgcctaggtcatcaaagtccagctccagttccgctagggcaaaaccatgaacccatccgaggattcacctgtcggataatgtatcaggagtggacgactcgccttcctcggtcttctctggtcctctcgaggatcggtttgttgcttcgtttgtatataaatgatgcccgtcacgagcgagctatgttcctttcgtcataatactcaccgttcaccctctgctacctgctaatttagacctatacaagtggtggttgttaggacaaccaagacacgtggggggaagatgtagaagtccatatacataagctgattaagcattgtgattgcggagcgaagcgaagcaattaaattgtagtcacataagcactgatcatcaatgagctctctgatttgctcacagagtacgaccagagtggaaggttgaacgcagctacatcaataaaatgcagggaattaatgaacacgctagttacttatctccttgtttaagaaactgaacaaatcaatcagtatattcatcgcgtggaatgcgttgttgaaatatttcttcaacactcaaataatatttgcattttatcgttcatcaaaatcatgcctttctccagcaagtgtccttacatcataatcttcacccagttgatcacctcatctttttgctgcctgcaattattgcccgtgttttagatcccgcctattatctcgtgagtgggactccacgtctactcgagtaaacggccatgtccgtgtcagatgttcgattctcgtgcgggttacttcagccggatggctctatggaagccgattggctcgcagcacagctcatcttccctggtagaatttcctacttctaaaagtggctgtatatactccgtagctatctcatgcattaagacctagattggcagaacagcccccagcccctgtttatcagcacaccgctcttcctctcgtcattcttgtgctttatgaagttggttttcttctcctaacagctgttctactgaatctactctattttcaaacatttcgaacgcaaaaccacggctaccagcgatatggattacgaggttgaacaagaaatcgtcgcattcttcgacaagactacgacgactcactcagcctgtgataactaagcgagtgagcatcttggtggaaatgtcactccagtcgacgtgcaaggcgtgtgtagctacaccgtctatgctggccctaacgccggattcgtcgtgcagtatcgtctgaagtccctagcactgaacatggacattatgaatctcgtcaaagccatttacggtaccttgacaccccagatctccttcaagggacagattggggataatcatgagattaaagaaccgctttacatatacgttatgaaccgaatgctaggcatctctcaactggattttatcctagcccataacggtgatgtacctaaaaactcgctcgagttctcccgctagcgccaaaatcttgtggccgacaacgcaaagtgattcatttctacgtgatatatacagaattgctgatcatatgtcttactatgtagattctttgctctattttgaaaaggtcctcaggatgttgatcaaacgtaccgcgagagcctgtgccatcagttcaaacgagacctgaatttgttacttgcttctctccccattcgattccatccattgatcaagaagtctcttgactcgttgccggccatcttttcacttcctttggtgctactacacaatgattttggttccttcaacatgctggtgaacgaaaattcttgcaatctgctcggcatgattgattgggccgaagctgagattgctccattcggcataaatctctacgctcatgatcgtttgataagatccatttgaaacatggctggtccaggtatgatgattatcgccttttggatgagatattctggagcacgtttagtcaagggaccggagtggacaatgaaacaatcaaaaccatcaaagctgcaaggattgctggagtactgttgtggcttggcttcacaagtcgtcttccgaatgagccgaagccagtaccgattcctgatgatgatgaaagtggagcatatggcatgcgtgatttagagcttttgattaatccagctacgaggttcacggacttggtatgataagatgaacgtgtgtctagaatggcggccaagcacaccaagcatgtgtaccagtacggcagccgaaatgggccaaacggaatgcttagtaatacatattatatcatttttaccgctggagttccagcgtttcgcgcaccggggagtcgagtaacgttatgttggtgttcagttcgcatgcgcctccaaggccctcccagcagccaaacatggagtacgtcagtgcgcgctggagaagaggatgcgcggggtgggatcggcatgacagaaaatgtacggcccaatccaaacccttcaaattcaggccgggctgtcacgaagtccgtgagagggatggtgaagtattcgagatgaggagcaacggtataagccatcttgatttgagtagtgctgatgttgtcttaccttccccgccaggcaacccctgagctgttttttttttttttggaaaaaagtgaaaagaggagaataccaactacaaaatcatagaataagatgtaatcttgtgatattgccatttctacacttccctgtaagatttcaatctatgtcgtatgagtcattgtatttcatgatgacaactatagatgtatatatatgttatatacattcaaatcctgaatctattttgattttgatatttttctctcggtagtcccatggcctagaatattaacctagaggtatcacaaaagggtcgctgaagggaatagtttaatagtctgatgtgggcaatatgaatcacagaattgggtgagaatcaaatgtctcagttgaagacaacagtcttatggccgttcaagatcacgcgacgctctgtcacgtacttgacagcagtggcgagtacgttgctctccacgttgctgccggcatgggtcagctccttggggctcatgccgtggttgacccgaacgacattctgttcaatgatcgggccttcatccagatcactagtgacgaaatgagcagtggcaccaatgatcttcacaccgcggtcgtaggcctggtggtagggcttagcacccttgaaagagggtaggaagctgtggtggatgttcataatgcgaccggacatggcggaacatagggttggggacaacacctgcatataccgagccaacacaatcaaatcaacgttgtgttggctcaccaattgcagaatctgggcctcctggtgcgacttggtctccgcggtgacgggaaggtggtggaatgggatgttataggtggccgcgagggtagcaaagtccgggtggttggaaacaattaaaggcacctcaatgctcagctggccggtggattggcggaagagcaggtcgttgaggcagtggccgatctttgagaccatgatcagcacgcggggctttttcgcagtggggttgatctcgaagttgagggagaacgactgcgcagtgggctcgaacgcagtgcgcaatttctcgagttcggggacttcatctcctccacttgcaagcgcaaattgtgtgcgcataaagaagcgctcagaggcaggatcaccgaattgcgacgaatcgataatgttgaggttgttctggacgagaaatgcagtgaccgcgtggacaataccaggacggtcagggccggacagggtcaaaatgaagctaaaagccataataaatgagagaacggtgttgaatccgctgatgttccgttgaatagttaagaggatggagaagaattgtcctggtttcttttcttttttctcttttttttttgtgaatcccactcccaatgttgccggtttcggcgatgactcatctgctgccattgcccgccttcggcttcttcttttgtttactttgcgcccttttgagcttcaatcatcactttgatctatgtgatctcctgtccttgatctacagtatcatttgggctcaggatcgacaacgaaaacatctcagctcgatcattttactcccccatgcgtcggattccatctttctagccaccttttctctcgcgcgacgcaaagccactcggcaacaacattatgcatcgatctcacctacccaggtgtcatgagactagaactgcgttgctgacaggcctgtgctcggcattggttccttgacccccgtgattaaaccaagttatcttcacgacgctaatgcatcccattgcacttccacgagccagcgtgcgcagccaacacaaattaccgagaactggggaaaaggctaccccgtatagaccctagatctgggctacggtagttactattttgtcacggatttaagatttttgtttaatctgggtgtgctaacatctccaagtcgggcgtcctacccagcatggcgttgtctgcctaattcggaggctagccatttagccgccaatgcgtttccatacgatgtgactgtgttgttgggggctatttggcgagccgaataaaatcgtcccttaccaagcgatgggaatgttcacagccatctcattcgcaccaagaagccgcctccacaaaatgataccaactacatccgaagccagtcgcggggggctccctccgtgtccccggagtgtttgtcgtacttctccattgggaagcacgatgaattgtgacccttgctagttcctattagaatataaacggactatgtatctatctgattcttaatttcctcatcaattcacccggcaatcaagacctcatcatggcttccactctctccaatttttacaaagatgccctgctgttggtcgccttgctcagaactgcacaggcacaacaggtgggcacaaacaccgctgaggttcacccatccttgacttggcaaaaatgcaccactggaggcagctgcacttcccaaagtggcaaggttgtcgtcgacgccaactggcgctgggttcacaacactgccggcttcaccaattgctatactggcaacgagtgggatacaactatctgcccggacgatattacttgtgccactaactgcgccctagaaggtgccgactactcgggcacttatggcgttaccaccagtggcagctctttgcggctgaacttcgtcacccaggcatctcagaagaacattggctcacgtctctacctgatggcagatgatagcaagtatgaaatgttccaactgctcaatcaagagttcaccttcaatgtcgatgtctcgaatcttccctgcggcttgaacggtgctctctacttcgtatccatggacgcagatggtggcatggcacgataccctgccaacaaagccggtgctaagtacggcactggttactgtgattcccaatgcccgcgcgaccttaagttcatcaacggccaggccaacgtggaagggtgggagccttcttccaacgacgtcaacgcaggtactggcaactatggttcttgctgtgctgagatggatatttgggaggccaactcgatctccactgcagtcacacctcatccctgcgatgacccaacccagactaggtgcagtggagatgcttgtggtggtacatacagcaatgaccgctatagtggtacttgtgaccctgatggatgtgatttcaacccatatcgcatgggcaaccagtctttctatggcccgagcaagatcgttgataccaagtcccctttcacagtggtgactcagtttatcaccaacgacggtacatccactggcacgctctctgaaatcaagcgcttctatgtacagaatggcaaggttatcccccagtctgtatctaccatcagcgctgttactggcaactctatctccgactcgttctgctctgctcagaaagccgctttcggggacagggacgtatttactcaacatggtggcatggtgggcatgggggctggccttgctgatggcatggttctggtgatgagtctctgggatgaccacgcggccaacatgctgtggctcgacagcacttacccaaccgcctcttcttcgactactccaggtgctgctcgtggtagctgtgacatttattctggccagcctatcgatgttgaagctaacaatgcgggtgcctacgttatctattcaaacatcaaggtcggtcctctcggttcgactttcagctcgaccaactcaagtgggacaaccaccacagtcaccaccagcagcaccaccaccaaggcaaccagcaccaccaccactactacatcaagcaccaccggcgctcctcaatatgcgcagtgcggtggaattaactggaccggtgcaaccacctgtgccagcccgtacacctgccagaagcagagtgattactactcgcaatgcctgtagatattaggcaaccgctagtgtgtagtggtggagactcggaaaatggtgaagataagaaacgattggatcagtttctcacgctctttgttgaattgatggttttggctttgcttgaattcgagagattgattttgcgttcttttaaattgaaatccgtatttgttttctattctccgatctttctccgtatataatatgcaggagctcttaggtataaccatcatatccccgttcattgctttgctgctcgtctttcgacacgcagggcttcaaacaaactttagtcaccaaattgagcatcggcgaaggattattaggaatgaggatgatttattcggctcccttgtgactccagtcaaagtcaacagggatttgtagagcctatttgatccgacgaatgcaatacgtgtacaaaatttggtttatgcattcaatcagcattgcgcactcgagaagcgcctaacgtacaagcgaaatccaaccctgcttaactagtcggagcagcctccggtttccgtatggcttcttcaagatgaacaaggtaacgccacatgcatcagccgggtctgggtatgcggggtattccttgcaggggttatcggcttacattgttcagaaaccagtgctgcagttgcaagcccgtgagatttgtcggataaatgaccggaaacttgggcagtctgacaatcgtcaggctcttggctataggtactgtactgtttgtcggcaatatactcccatatccatggagtactgtaaattgattccattttgctttccagcttttccggtgcctctcgtgtctaagctccttaccccgtcgcctcatatccgaaatgccagccacggagagattgatgccgtgccgaatctggactacatttctctcgtatattagcgattcattcttattctagctcgggtggcggtccgcaaaaagaaatcccaaattgaggcctcgaagacgatccccgcagacctttctcttaagctaaagtgtttccttatacgtaagaacgaagcttcgcagtctaagtcctaggtaggcagggagcttgctccttgtcgttattgttcattgtaaacttgatataaatcctattataactcctgatacattcacactgcgtagcagcctcgacaattccatcacctagtcaagatgcggtttacctctttatttaccataaccggcatcacaggcctgggactagcagtaccagatgcggtggaattaactggaccggtccaaccacctgtgccagtccgtacagctgccaaaagcagagtgaaaactactcgcagtgcctataggtgaagcagtagagcaacaagacatcgggatcagcggtagcttgacgagggttctacattgttgataaaatcaaatgttcatacatacttgtagatctggatggctctggtaactcaatgttgtacagatcgtttgttaggagtctcttcgtgttttgttctacacagcaacattccacttcatctctctctattgcagagtagcaaccagctcatccacggttttcatctcgcgaccgttgttctcgccgacgtccagtgcaaccaaaaaccgactcacacagttataaccggcgatgccagtggtgagctccacgatctcgcggtcatcgtacccgaccgtcttcaattcagcaaaaacagcatcttcaactttaatggtgcgagtcatttggtcggtatagcgtaaaacggcgcgctgttgtggggtgagtgcgctagtctcaagctcggaaatatctccctcggcggtacaaggcagtgtgagagcagcctgcaattgactgggcttgataccacctttgagagccagtggagcgtgggcattccattcgtaaacagcgttattgagtacagcgacacggcagactgccaactccatgacaccagagtcaaccaaagtgcgcgaccgaatagctccgatgaagctgttccagccatcggcgacaggtgggctatggaggagggataggtcaagcgggattaaaggacgggggtttctgcgctccgcgatgcgggcatagatgtcggcggtgtcagggtgcgcatcgacaggcggggtggaaggggcgtaaggcagacgcatggtgcgtgtatgattgattccgagtgatatggggttatgtttgaagatggtgtatctacgctgaaacacgtacattggagtccgttttcaaagtattatgtttttttcaaacctcaacagttcaaacgcgggggcgggaaatgtcttacccgcccacgtgggggagtgtttctccggcatcatataggtcttcgtaggcatcacttcccgattagaaatgtctactccgtactcttcaggcttgtatcgaaatgagaagtcggtttattaatagtaatagatcaggctgagttcatattctcgccgcaaacgagctccaagtcactatgaacagtctcaagagcaatttgcaaagttagtatgttgtacaacagatatacttggacgctaccccggattgcggagggcactcggagctttgaaaacgtggtgggcttagggcttaggtatttcaaaaaattatactcatactcacctggaaccctcaaattatcagagaacaaaataatggcaaacttgatcccaacaccggcactagagtaaaaacatactcccgcagggtgccgcccctcgatgccgatatcccccccgcatgcggataacattgaactttcattatattgaagttttcgccttatacatgatccgttctgttttctctcggccatctgcaatctctcggtcattttctcactcctcaatcgccaatatgaagcatcatttgatggtcggtacctggactgcccccggacgtatctataccgtgcaattcgacgacgatgcccttacgctagagttggtcaaaaataccgagattccagaagccgagcccatctcatggatgactttttctcacgataagaaggcgatatatggcgcggctatgaagaagtggaacagtttcgctgtcaacagcccaacagagatcattcaccaagtgtcgcacccggtggctggtcaccgtatgtctacggagtcaatggaatacatgtccaatttaccctcgctaactctttcttttgtttcgcgctagctctggctcccagcagcgagaccaacactcgtgctatcttcgtgcttgccgcccacaagcctccctacaatgtttacggcaaccctttctacaactacgccggttacggtaacgtgttttctgtgaagcccgacggaagtctggatagcaatatccagaactacgaatatgtccccaacactggtatccacggcatggtgttcgaccccacggagacgtacttgtactccgccgatctcacggcgaataagatttggacgcacatcaaggaccccaagacgggcgaattgacactggtggattgcctcgaggctcctgatgccggcgaccacccccgctgggtcgagatgcacccgagcggcaagtacctgtacgcgctgatggaggcgggcaatcggctggcagtctacgtgatcgatgagcgcacccacaagccagtattcactcacatcacgtatcccttactgccttccggtgagtttcgacaaatgcgaccgatgttgatggtaacaactaactcattaggcctccccccgcgtaacaagtatcgtggagatgtcactttttgcaccaagggtggagagtaccttttcgcgactactcggtcaaaccatttcgatgtgactggctacatcaccgcgttcaagctcggctcgcatggcgagatcgagcgccagctctttatcaacccgacctcgaccagtggtggccactccaacgccgtcagcccctgtgacttcagtgacgagtggcttgcgctgtgcgatgaccagcttgggtttgttgagatgtaccgctggcgtgatgagaagttggcacgcgtcgcgcgggtggatatccccgaacaaggatttggtatgaatgccatctggtatgattgaacgaagaaattagaataaatgaagatcaacatgtagagcaaaagattatgtacagtacacaaaatagattggtgtaaaaaaagacaaaaagccgaaagggaaatatcgtcggcagtcaagttcgggttctgctttcacccggatgagggcgcaattcgagtgccgatgttctttatgttctggggatcctcttttttcgcattttcgcatctttggctcctttctctgtattgtctattctggatttcctttagctcttcatcatgcctactcccggtcttctctacgtgacaatgcagcccaagggctcgctaccggacacccagttccacgactggtataacactgaacatgggcctctgcgtctgcgattgccctttgtcactaatggctttcgtttccgtgccacagatggagaacagcctgaatatgtggctttgtacgatattaccgacatggacgagttgacccgcaagacctacttggatctgagaaccgatatgatcaagactgagcgggagaagaagactatggcccaaattgatgtcggccgtttactgtatgatctagtggatgagcgcagcaacacgaacttccgcccgctagaagatcaagccgatacggatgccgagacccggggtagcgtcctcgtcgccgtccgagttgccactcaccccgaccccgccaaagaagctgacctggataaatggtaccgcgaggaacattttgagatgctctctcgtgtgcctggatggcgccggagtcgccgttttgtcactgcggcgatcgattccgccgccccgcgcgaatcgctgactctccacgagtatgcccccgtcaatggtcttggaggtgaggcccacaaggccgccatgaataccccatggggatcgcgtctcatgagcgaggtggtcacatctaagaagcgtcgcgtatatgagtggtactacaccttcggccctgctccccgtgagctcacttcgctagctgccccagatgtcgttggtccctggagctccaatgatggccgtactcgcacatttccctcgaccacccgcccagctgtcgagtcgttcatcactacttctgatggggttgagatcccctacaggctggagggtagcagagacccctacgcgcctgtcgtcgttctgagcaactccatcctagtcaactggaacatatgggatcgtttccttgacgccttctttgctcagcaacagaatcagcgttaccgtgtcgtgcgctatttgactagaggccgacgctcgcagagtggtgagcagcctgtcaatatcgatttactggcctctgatctggctacgttgctggaggctttgcgtgtgcctcccaaggccgctcgtttgattggtgtcagcctgggtggtgtgaccgtattgaacactgctctccttcacccggagcgcgttggagctttcatcgcatgcgacaccaactcctccgcacccgaatccaaccgtaaggcatggggtgaccgcgtggctatctgcgagaaggaaggctctaccgatccagacaccaatgagcccattgttggcgaagagttagccgaggtaaccacccgtcgctggttcgtgccggaatcataccaggcccagcccgaggtccttgcgcctgtcaaggaggctgtgcgcaccaacagcttgaagggatttgcccatagcgtgcaggccctctgtgcctacgatatccgtgagcgcatggctgctgccactgtgccaggcctgttcatcgctggagccaatgacggtgtcctacctcagacaatgcagaagatggcagcagatctacatggtggcgccgaactgaagctcatcgaccgtgccggccatctacccatggtagagcagcctgtggcattcgagaaagttgtgactgagttcctcgggaaaattgatggttgattgcatttctataggtcatgtgtagatagattttgttcgggcgtatgcaaggaaatgactgatgaatatgttgactgaaccttcgccagtgagacatgactgtatcttcccttcaagtgcgtgcttgtatagagtattgttcgactgatcaaatcataacttcggatccaccaatgtgtatgtacgggcatgtgcgtcagatgatctccgggcttccgttgtatggtaaaagcctgaatatattgtccagaggatgaggatgcttatgcgggagggaagggtgaccggaggctgggtgtctttcgaagtacctcaatgaatattcagtagaccgaggtccaaatgtcaagaaaaatctcaactatgagctgtatcacagagcattgttgagcacaatcgtaaagaggagaagacgaaatgatgagaagaaaaagttgcagagctgaacagttcggcagacgaaggcggccaagggtgaaattcagcttgcggggggaaacgtcacacttctccttgacgcgcacttttctacacgttcttcttctccgctctctttcactgtttcttcaattattcctttctatcatgcctgagagcaagattcctcaaccgggtcctgccaaactgaagcgcaatgcgggccctgacgagtggctggaggcagcgaaggattgcaagtatctatcggagccacatatgaagcaactgtgtgagattgtcaaagaatacatgatggagggcaagtgctattcaacctgaactcagttctattattctaacattgttcgcagaatcaaatatccaaccagtatcgacacctgtcacagtctgtggtgacattcacggccaattttacgatctcctggaactctttcgagtttctggaggcatgcctgatggtacagaactcgatccgccgaagacatccccctccgtgattacctcggccgatatcgaacctccctcaagcatctcagatcctaaaattcgcaagaagcttcgcggctccaacatgaactccaacgacgaggaagattcgagttcacggagccgatcggccagcggtacatctgcagatctccagcttaaccgcaactttgtatttctaggcgactacgtggaccgtggatacttcagtcttgagacattaacgctcttactctgtctcaaagcgaagtaggtcgcacatggcacctcctggcgggtacgtgttcactgctgactcaatatcctagataccccgatcgagtcacactggttcgtggtaatcacgagtcgcgccaaattactcaggtatacggtttctacgaagaatgcttccaaaaatacggcagtgcttcagtatggaaggcatgctgccaggttttcgatttcatgacattgggggctattattgatggcaaggtgttgtgtgttcacggtggcctgagccctgaaattcgcacattggatcaagtccgcgtggtagcccgtgcacaggagatccctcacgaaggtgccttctgtgatctcgtgtggtctgatccagacgatgtggagacgtgggctgtcagtcctcggggagcaggtgagaatcatctaggtctttcttgaacacgcagctaacaattttaggatggttattcggagacagagtggccgatgagttctgccatgtcaatgatctctcgctgatcgcacgcgctcatcagctagtgaacgagggctataaataccactttaacaaccaaaatgttgtcaccgtgtggagtgcgccgaattactgctaccgatgcggaaacctggcctcggtctgtgaaatcggagaggatctcaaacccaccttcaagctgtttagtgcagtcagcgatgaccagcggcatgttccagtctcgcggccagggcgcagcgagtactttttgtaagatgcgatgcgagttctgcaccggcgctggcgttcggtttgatatttgggcggcaggataagcattatataatgatttagaccagacttaatgatgcatacgccttgtgtttatgagaaaccaaaagggatcatctcaagctctagagatctgaatagagaaccggcgttccgaaaacttgatatcccttgaagagcaaccccgatcaacctctccccgcgctccatactatgggaagcaacgacatggggtaaattaaaacaagggttcgcaatatcaacacggcagtcaccaggggattgactgccgaggcttctcgtccagagcgattgtcccgcaattgcctgccggggcgaatcccgagatccgggggatctctcccaggtgcaccataaaagatcctagatatatgcactcgctaagtgcatttgatctcaatctgcgcgcacttatacaatggagaaagtcgatgttctcatttgcggcagcgggtctgccggtctttgcgctgccacttggctcgccaagtatggggtgcggtgcaaggtactagaacggcgggatggtcccatgaagatgggccaagctgacggggtacaatgccgcaccgtggaaatttttgaaagcttcggaattggggaggagcttcttcgtgaggcttaccacgttctagaggtcaacttctgggccgacaatggcacaggcgccatcgagcggacaggctggacggcggatacccagccgggtctatcacaccaacctcacgttattttgaatcaggcacgtatcaacgggctcctcatagacctaatgcagaaatataatgatcaacaaatcgactatggctataatgtgaccaatgtcaaagttgatagcaccttcgctgaggatcatgatgcctatcctgtcaaagtcactgcggaaaaggatggaaagacagaaatctttgcagccaaatatgcattggtaggtgctcattatctttggggtctagacgttttctgacccgaccatcaggcttgtgatggggcacacagcattgtccgcaaagccctcgggtataaaatgatcggagacagcagcgacgctgtctggggtgtcatggacatggtgccccgaacggatttcccggacattcgcaagaagtctactattcgctcgaaatcagggaatgtcttgattattccccgtgaaggcgatagcgataacctgacaaggttctatattgaacttgctccaggaaccaacccgaaagaggtgactctaaataatttgcaggcccaagcacagagcatcttccacccttacaaggtagaatttgtggaaacgatttggtggtctgcatatgccatcggccagcgtcatgccgatttctttcacaaggatcaccgggtctttctcgctggtgatgcttgccacacccactctccgaaagccggccaaggtatgaatgtcagcttacaggatggctacaatattggctggaagctcggggaggttttgactggtctagctagtccctcgcttctagagacttacgttatagaacgtcaaaaggtggccgttgatctgattaactttgaccgttacttttccaatttgttttcttctggggcctcaacatctcctgccgagttccaggaaggcttcatcaagtctggcaaatatacagcaggtttaacagccaagtatgaggtgtcgtccattacatcttcattggaatcgaccaacctcgcttctaacgtggccgttggtatgcggatgcccagcgcgcaggtcgtgcgattctgtgactccaaacctctacatctcatgaaatctctcaagtcagatggccggtggcgtatcatggctttcgtgggtgacctgactgtaccagaaaaccacacaaagctcaaccaggtatgttggtcacttccgaaatgtacttaagccttatctaacgtatcgtatagctgggagaatacctgaccgtggcggatgggcccatccagacattcactcctgaggatcaagacattgacagcctgatcgagactattttgatcgggtatggaaatcgtcatggtattgagttggagcaaatcccggaatgcttttatccagtctctgggaaataccaaacaagaggtgcatattctctaatatcttatggtcccatcattcctaacccagagtatttagatctacacaagatttattacgacgacgagagttacaacaatgggcacggccatgcatacgagtatctcggcattgatgcggcacagggtgctcttatcattgttcggccggaccaatgtaagcaaatccgtaatcgtgagataactagatacaactgacgctttcaaatcgatagatgtttctgctattattggtctaagcgattattctgaaatcggcaacttctttgctgggtttctccaacgtcaaacgtacgttgcgaaggatacgaaggacacacctaaataacatgtacagtagggccatgaattccagctgtcaggcgtccagcccaattgcagacatcatggagaaacatggttaggttgaaataaatgggaatttgagtggagtttgcaaactttgaatatcattaatgtgctcaattttcctgcggagggtattgtgattcaaaggtcggtctatatcgaagctgcttgaaatccgtacaaattgcatgtgtcaggctatccttaccaatggggcagactatctagtcctatttgtgtagttgccctcggtctccgacacctatcatccgatttttatcctgatctcacgccgagctcacgttacattgagagtcactcatgtcttccaattcaatctagacttattccctccgggcttaacaaatcttcggagtaaatgttattataaacgtcgatattaaaacctttttatatcaaatttcccttttcgttttggtactcggaacagtttcctaaacactaagccggactttcactatggaggtttctgttgtcatgtttgctgctattctactggccacgtctatcatcgcatctcctctctcctctcggctacagacagacggtgagatactgcgatcttcccaagctctgcgccgcacgatccagcctcataaaccaggcaccttagaagtgctggatctgaaccaaacgtcccacgagacttacagctccaactgggccggcgctatcctcattggtaccagatacactgcggtatccggagagatcacagttcctgtcccccaacttccaaatggtgctgatccttatacaaattactgcgcctctgcatggattatcatcgacggcgatacttgcagaacagccattctaaaagctggaatcgatttctgtatccaaggaggcctctgttcatatagcgcgtggtacgaatggtatccagactacgcccatgactttagcaacatccaaatttcggctgaaaatgtgatcaaaatgacagtcgatgcaacttcgaagagttccggctttgcgactatcgaaaatctatccacaggcgtatctgtgacgcatatattccccaatagccttggcggtgacctctgcgagtccaacgccgaatggattgtggaggatttttctgtaaagaacgcattggctcttttcgccaacttcggcactgtagtattctccaatgcagttgctttgcgcggtgggataagttacggaccatcgggtgctcccatcatggacatctatcaggatcgaatcctcacatctacttctgtcaacgacaacactgtcaatatcagttatatctagttctgacaatctctagaacaatccggtggaacattgaaattttataacagaaatgaaatagaagttgcctacaatgacctcggcataaaaattacatcgtgctttctatgcaatgtatgtccatcccgctctagtaactcttatcaaacggttcacggatatcaagaacgtgggcagcttttccctgcagacatatctaactactgactgacgcgatattaggaatattcatgtattaacaccaatatggagagaagaagccagctttcttcgattaaaaaatggcatttacctgtgataaccgaaaagagggagattggggacacacaaagcaaacccatcgcataatttattatttaaaagttggatagattattgttgtccccatttcttgctaatttggctaggtttaaaacaataggtgacatcgaattctgccattaaactagaaatgttgtatcatggtcgcacaagtctatccagacgaaagagtcgaccttttaggatcatctggcatttgtattccatgaaatcgccagagagcatcacatatcacatcgtaacaagccccgtatcgcacaaccttcattgtgctaaaatcgatcatggttgaagaggctcgtggatggtgaaacttttgtgtcccataatcaacgactatatctgccacctcgaggatttccggctcaatgccctctaccacagtctttgttccctttccgctgatattggccgaagatcccatcagaggaagttcctctatagcagcaagtcgagataattcttctagcaaaccacccccgttggctaacattgctaaagtgtccccagcaacgctctgtgctaatgcgtttggcggaattttttggataatcggatggtcagcgcgatatggtgcaatgattcctagaggaaggtccaagtccacggtcaagagtttgaccataccggcttctttggggggaagaacatgaatatctcgatgcagattgtagcttccgaccattgcatgtcgcttgtgtggttcccgccgtttcgttcgaaagattcggtccaatgcgtccgggttgatcgcgatgatcccgtagccaacgctcatcggaataatcgcaataccaccccgtttcagaacttcgaacaccgctctggcatcttcttttgggctcggtactttatagaaagacatgatcattgtatgaaagatttgatgtatttgggcatcagagcttcattctagtcatgacaagtggattaaatctcatttaacaatatgtccaataccgagggaaccgagatatgtaacacaaaacacaggaactcatgtgaatgaaagtgtaaataatctggcttgatctcattcccgagtgacacctgcaatactactcttttgcttcaggtatcaaggagccagctcattcaatgttcacagaggactcgttggaaaggaaatcccctcgattggcaccttcgttatctctgagttgggatgtagtcacattggataattcagttggccacaccgcatgccaagttccctgtgcacgaacagaatattcatgtcccttttcgaggcctggaatcggcaaattcacagttacatcaaggctgtgtcgcgcttgtatctcaacgagatcatcctcggaggcaggtagcttgcgtgataccataatagtagggatgggcagtttccgttgggccgttgtgtcacaaatctggaagacaccgagaacaccagcctgagggtccaatggactgccccatcttagaatggtgactggtgtatctgcggcattgtgaacagaaactttgattggtagagcaaatgaatcttgtgcttcggagattggtgcctgaagggccacggtgacctgtaaactcaagtttgacatagttgcgaaaaagtcgtttccgtgatcaaggtgcgaggagaataatagaatagacagccggcaagttaccagtagtatcgcgggccttgggttgttgaaagaccagaggagagaatcttatcacgccttatatctggaattgttgataatgttattgatctctcatttcaaccaatcaaacctgttaattctatgccaagccgactgggcaggccgctccgcattcctccggggctcccgtgcaatacactcctttctcgtagacttggcaccgcttctcgtcccaaacgggcccttcatcacgatagccaagcctctatgatgttaccccaaatagctgacactaagcactatttctgaagtcaagacttcggcgccgtcttgggtcgtatcttggcactgtcttggcaccggagtccggagacaaacgcacggtctggggcttggcgtggtttccggatcgttcagaatgatatgagctgagctgttacctagtaggttgtatcattatcataggcaatttgtgttgatgttcctatcgtacaatgtctttgtgtctcacaaatctaacaatggtggtgtacatatatttgtggtatattcccccacggaatgatcttactttcaaaagttaataccttagtttgtctatatatatctcaaacacaaaggtttacatagagacttgcaacttttaacgccaagtctttctttgtctagaaccgatcgtgaggagttacatcgagcaagccctcgcctgttgaagcatgatgtgggatcaaattgcagtttcataggctttcagacatacgatccatccttcaggggaacggatttccgtcgggccaaggacaacatctatgatgatcttctgaagatgcagctgtctcaatatatctctaaccagtgacaagattgcggacggcctgcccccgggatgttgttatctcacgatacattcgaccagtgacaagattgctcgcaagtctcccgtgtccatcctatgcaagcgtggcttctggcgtgatcagattgtttcatgcagagaggtaaccaccctgtttcttccgccatccttctgggcaacgcggggagatggaaggtgtacaggagagaggagaccgcggcattccattcaaaacggcatcatgtgtccagtggctataaagcaggcgttcttttcttcagaattgaatctttcttattccagcagcatccaagatatcagacttacaacttcatcttcttttagtgaatcaaccttttgacatccgagcatcatgcgttttactgccctttccacggtacttctggctctagcacagcatgtgcatgccttgccagtcaaaaccaacgagacttctgctctcgatatcaccttgagtcgtgtcactgacacccgtatcaaggctgtcgtgaagaactctggcagcgaagatgtcacatttgtgcatctcaacttcttccgtgacaccgcaccggtaaagaaggttaatgtcttcaagaacggtatatgaaatttctccagaccttatcagtttaaagctaatttaatatcagatgctgaaatcacttttgagggaatcaagcgccggttcgccctcgagggtctcgctgaggaatccctcacctccctcgctgcaggagagaccttcgaagatgaatttgacattgccgctaccagtgacttgtctagtggaggcccattgactcttcgttccactggcctcgtgcccctggtcactgatggtacagtcactggatatctgccataccgttccaatgatctgaagatcgaggttgacggtgtcaaggcatcccgagtgctgaaggctatcaagccgctagatcgccgtgctcttcaaacttgcagtaatgcaagcaagaagtctgcacttgccaatgctcttaagaacaccgtgacgctcgcaagcaatgctgcagaggctgccctttctggatcttccactaagtatgtgcataccgttctactaccaattaatcattctaatagcctcccataggttcaatgagtacttcaagactaccagcaccgctacacgcaatgtcgtggctgctcgccttcgggctgtggcaaaagaggccggctcggtgactgccactaagtactactgcgaagataccttgggatagtcagtaccccctttcgataaaaacttgacgtgcatatgactaacaaatgtaatacaaatagctgcgaaaccaatgtcttggcttacactctgccatctcaaaatgtgatcgccaattgtgatatctactacagcaagctcccagcattgactagcacatgccacagccaagaccaagcaaccacaactctccacgagctcacccatgctcctggcgtgtacagcccgggaaccgaagataacggatacggatacagcgccgcgacagccctcactagcgcaaaagctgtgttgaacgctgactcgtatgcactgtatgccaatggttagtgttcgatgttgagtccgtttgaagaaaatcagctaatcagcaaacagcaatcgcccttggctgctgaatggtcaattctccgtacaattgctcccgggggtgacgtacgaagaaccgggatcaatttgagttcgccagataccaagttggatacatgttctgatgaggtttgcaaagagagactagttgtggcaggatattggttgagaatataaatctgcagtgatgataaatatcttcgccttgttgtaatgtaaacatagtccattgcttgaaaggccgtactacacgcgtacacagatcgggacggttcctgagttcaggactttcttggccttattcctaccactaatgattactttgcggatatacaagtcttcggcggcagactcgcactctctatcataatattaagattcaaggtacaaagcatcacctagtggttattttctgtcacatgagaaaagacctatgtcgactgcgctaaattggagaaatttcacccagagtgcattcaggtccataatacacgatagtagcatcactttgaggaattagtaattaaacgaacccaaagtgctttaaaggactagtcctccacaggcaatgcaccctcagcctgcatctcgagcgccacctcgtcaaccttcttccatacccttaatagatttcctcctgccaccttacttgcatcattgtcactcactcctcgtttgagcagctccttaatcagatgcgggaacctggacacatcctccaatccccgaggaaccgtcggaataccatcaaaatcactacctattccaacatgttcgaaacctataagattcccaatgtgcaggatatgatcagcaactcgttccagagtggcgtgagcagggtcctcgtctgggatcccatcggcgcggtcagaagccgtgcaggaaatgaagtctggtgcaaaattgaccataaccagggagttcttctcacggaccagctccaagatgtcgtcgggtacgtttcgcgggtggggacagatcgaataggctgagctatggctgtaaatcactggagcacggctccctatccactcggacttgccggcgcccagcacatcacgcatggtctccgtgctgacatgagctaaatcgacgatcattccaaggcggttcatctcaaaaaccagcttctggccttcttcgctgacgccatgccagagaggatcggacttttttattccaccgtctggaagttcgagaatggcggcgtcggcatatcgattatggcaattatgcgtcagagttgcgtacgaaacccccagctcatagaagatccggagatgcgccagtgagttgccgatcgaatgtaagccttcgataccaagcggtgagatgatctttccctcgcggaaagcggacatggcagtggtaccattggggggcttcgagaaaaccgtgggatatgcttgttgaactctcgacatgatatccacctgctccatagtctcacgcacgcctatcattctgatgtgagtatgtgtgcgaaatccatcgtaccaaattctcttacttgatgcataattctcgtcggagaaatcggtcccattcttgggacaggggacgaaaacactccaaaatgtaccaccaactctaccttgttttaatcgggggatatcaacgtgaccaggaaatttgccgttgacaaaagcctcagtgaaattgcgatcatttacgcggttatggaagagttcccgaaccaggatgggaaggtcatcatgcccgtctgttttaggctatcagtcagagttattcccacggtttttatctatccaatctccataccgatcaatggagtctgagacaggatcttctgcaccctttcctcaatgctcagggggagtaaaggagagcgcaacagtgtgaaccaggcggtggctacaatgatagagagaaacaaccaaagtatcttgaagggatggttcttctgcttcaaagttggcgcatctgcttggctctccaagacgaggctcttctcttcgctcattgtggacatctagagtgttacgaggtcgaagagcggagatgcttatcgataaggctggcttagcctcggcacgacctcggagtcttcatgctagtcgatagttcatgacaagatcagccacaaaaagttcataaagagtagataggtaatttcggtggactcaagtgatatatatttgtatgtatgtgtgcatcaaggttgtatatatgttggtgtgagtgcctaagcggcctccagggctaggcacgtgcacataacggtgctgactgaccagttaggcggtgagaactcgggtttaatctattcacaccgccttcaacccgtagatgccccggtagattatcaacttagacgagtaggctggccgggtcccttgtttaacatcctttgggatttccaggacttcattttagggaagataaacataatctcagttctccatatcgcaaaggcttgccataatgcagcctggcaagaccaccgccggtctactcccaattccggcagcagctacgcaaaagtcgggctctggagcgcccgcaaggaaaacgcctaagcctcctgctccacgtctcaaacttctcattcgacgtttgccacccgggctaacacaggccgagctggagagtgctcttggggaccagtggaaggctggagcagggaacgttgactggcttcagtacaaacctggcaaggtgtcgaaagagtaagattcaccttcctctgatgcaaaagcgtatttatttcgactggctgacgggacttcttcaaatagccccaacaaaccgtctcgcccgtcaagagcatacatacacgtcgtgtccaccgaatgtgtctctttgctctcggacgctgtgcgccaggcttctttccaggatgcccgtaacactctacacgaccccattttgctggggcctccgtcgctggagtttgcaccttatgccaagacccccggaagccgctcgcgcaaggatgctcgtcaaggcacgattgatcaagattcagacttcatcgctttcttagaaagcctgacccagcccattaccaggcctgtggctgtggattctacacccgatggcgaggacaagaagaagcaagccgtaatgaccaccccgctggtacagttcatcaaagacaagaaagccagcaagttaaaggacggcagtgggtccaaatctaaacacagtcggtcggacaaggaatcaaagcaggagaaggtacaagcaaagaaacttctacaacgaggcgataaggaaccctcggcaaactcttccgacaagaaacccaaaggagaaaagacaagcaaagactctgtcaaagcaaccaaacaaggagccgctgccaatgccaagggaggcaagtcgagtacgacatcaaacgctacaaaggatacagccgcggctccagagcggaagagagagcgcggaaatgtcacagcagccaccaagattcttcagcgtgatcttggactatcgacatctggtgggcgacgacgcgggaaaggtacttcgactgatactgcgtcacctaagaacgagagctctcgagactcggctattccatcagccgatctgtccaaggaaacaaccaggcctcctaaaaccgcatcatcctcaaccaatgctccaaagcccaaggacagcgagtcatcctcgcgacccgatgcggctccaccgccacctgcaaccttaccagccaagtccactaaagctggcaaatccaagcacccatcaactgctaaacaagcattcctcaagcacgccaatccatcccagggtgtgaccgaggcacttctgcagtctgcattcaccccatttggagcagtgacgaaggtcgagattgacaagaagaagggattcggatacatagattttgctgaaccggaagcacttcgcaaggccatcgctgctagtcccgtatcggtggcccagagccaagtggtggtcttggagcggaaagagaaccccggaatcgaaaagtctcggaagggacgtgaggggttcactgccaacaagacgaaggctcccacggaagcttctgggagcacttcaggtgctggcggtcatgtaactggaggtaacgctggctcctcccgcggatctcgtggagggcgtggatcacggaataagggacccaagagtggagcttcagagaaaactggaggcaccgaggcggagtgagggcagggcctacacattgagttctttagcaattcacgagacatgataccagacggcatgacaggttttaccgacaactacataatggccgcggcaaagcatttgatttgatagactatacataaccaattcattgaaccaggcaataccaatatttcgatgtccgaaaggatgtcgcagggttatgaaaccgatgaagaggtaaggttgaagcagaagaaccgtccgagacatcacaaaactaggttcgaccagtactgtcaacagacaaagcagcgagcggtctacaacgtcttgaggaaaaaagtacgaacaggtttgaatctaaatgactgaaaaaaatgaatgtaattttttgctatgtgcatgaaccccccacagctcaacataccatctaccaagaaggaagaggacctttcagacctcctcgacacccaccaggaccgaccgaccgaaatcagacgtcgagaccaggtcaagatcatcaccactccctagaccgaaacacagacactgcgaacagcacgcgtgacagtcgaggcgggagtaaaaaggtttcactttagggcatcgaggacatgtagtcatcagcaagggtggagattctgtggctcttttaaagagtttagaaaggggacgtctactctaaagtgattctttgaactgtgaaaaggtcagcaaaatgttcgatcacagtgaaaaaatggttttctgctgtatgggggggaagaacatacgtagagtcgcttgaaaaagagaagaaggtctgggggcttgggcttctttatattcctgccgggcacgctagtgctaagcgagattgtcgtgtatttgtctggtttgtctggtttgcttggtttggctgttctccggtgggtcgtcctgtccaatcattttcttagggcggatccttcattgaaattttcaacttcagcgttcttctactcgtctgtatcattttgcattacttgattatttgtcatttctctaattctatgtgtcactcaatatttcctatctattcaaaatacgtaataacagaacctcaagaagtacgccgtacatgaccatccttctcccgaggtcgggccgcggacgcttatcgcttatcgcttatcgcttatccttgtatgcggggatctcatccaaccccagacccgtggacttgtagactcttcaagcatgccacgccccaaggtccatccagcgaatcggctgcgagcgaacactgcatgcactgcctgtcgtgcatccaaaaagcgctgcagtggttatttcccatgcaccaactgtatccataaaggatgtggccgctcatgcaccccattcaagtccttatcacacgcaggcctccgaagccctctcgtacctgcttcacgacccacagttgaggcgcctcggacacggaggggggtgtcagtggagtcgcaaagcctcctgacgtcacagtctcatgacattggtacgccccgtgtcgagcctgacacgcccgaagtgggatcgcactcgcctgaagttacgcatcggacacatccacgcatgctccgcaacctgcaaggggaacgaggtatgaacgtttgcgaccgccatgcatatcatttgattgacactgtccgcagtgtacgtcgggaaggccgcctctctatcattcctacaattgcttcgggatacagtgacccaacatattgggccctcgcagttctctcataatggggcaagtgaggatatgttagagacagaagctcatcatgatctgttgaatttctctggagaatgttgcactgttgctgagaaggagcgatttatccagaattaccacgcagcggtaggccgaataccaatcatgaagggtagatgacttactgacagtatgaaagacgagcggatttttcaatttgagctttagtgacgacgtttcatcctcattcattgacccagcagagcccaaaaccgatcgggaaaagactagggcagccatcatggaccttatggttgctatcggagcacagtcctctccgaatgaccgagaattccttcaggtggagcggttctacttttctcgcggtcaacgtaggacatttgccaacatgttggaagatcctagcgtggatttagtccgagtgtttctactcatgtccttctatatgctgggcgcatgccgtcgtaacactgcattcatgtacctgggagtggcttcaagagcagcagtggcgcttgggtttcatgcggaattttcaggttcaataagccccgatgagagtggtgagagaaatgaacggtaaaagcttctcgcaagatcttctttggcccagctaatctcaaatagatcacgattgtggatgagcttatgtattctcgatttgcttgtcagttcgatcctcgggagaccttctgctatatcacctctattacccgagaatcgacagggacctagttggggggccgcaccgagtgatcctggcctggtggcctcatatcagctgtcgttgatcctcgataaaatcataaactgcctttacagtgataaggccgcatccgcacaacaggcagacctgctattatgcaaattaaacggctggggtgaatatttgccgagttcattaaggacgtcgtctttaggacatcaagaccagagtactttccaagagcatacaattggaaacatgcacgttgcatgttcatatcattttgctgtgatcttagtcacccgacctttcctcgtctcggctttaagtgtccggctggcccggttacatcagagtctgtcgaccggtgatcccagtgaggtgcctgaggaggacccagcccactctcgtctcgcagcggcatgtattgattctgctgtatacatgctccaaacatgtctagaggttcataagtccggcctcctccttcggaatatgtgtattctcaagttagtctgcgtgtatatttatctagtaactccaatactaatctcaaacagagcgtttatctttgccgcagcccttgtactcgggttctctatgttctctcaccgtgacgtcgattctgagattgatgaggtattctgcggtgccctgaccatcttacgcatgctggcgccgcagtctgcccaggcagctcactacctagagataataacaaaactcgaggccgccataagcaaacagcgccagcaactcgctacccaagcccgacagcgacggagtcaatacgtcagtcggatatttagcatgaacgacagcccggcaacaccgcggacaccaagtgaggggaacgaagaagaagcaaatacgaccccgcatctatcgcagagtgtcacatcaaatgggtggttagattcaaacgacagcgcagctgctgtgtcacctcccatgattgaggggactttattcgactgggagggtatgaatttaccattatgggatagttttccattcctcgcggaatcgactacgatctaatgaaatatactacacttgaattataggtttagttgactaggacttgagatgtcgatcaattttcttctaaacggacgacttcacggtcggaaccaagaatccagaaggataaaggttcgaagtgtcccagtagagctggtaaatatcgtcgacatccgtagccttcagacggaacgaatcgtgcagaagtccattctcattttgccacatgagatacctgccatagaaaagaaattgatctaccttcgcatcgtccggtgtatcatcgtccccagtgaagcccacaggtagcaccttattaggcgtgggacggatgtagaagaatgtgtcagattcaaaggtgtaatccttgttggtggccgtggcgatgatctgggagttattgaagacaactaatagagtatgagccgttgcctggttaaaagaaaagcgcaaatgcaaatgagataaaagagaaatatcatacatgtaacatcggttgtcaccgatccagacacccactgagacgaatcgccgacatatgcgagtcctaggtatcgggtcagatgggagtcagactcataggggaatttataataaccatccgaataaaagactttcactccgtcggatgcgacaccgtaggcaagaatggagaaggatcctgttggatagcgcttttgcagctccgattcagagggtgcagctataacttgcaaggccaaagccagactgatcggtagaatattcaatctcattttttgttttcgatgatgattctggagagaagatcatttagatatcagcgctgggtgtgcggttgggcagttataatgtcttattgtcagacaattaaccagtgaccagagacaacctggaaacagactagggtgacgcgtcagatgcacttgacggctgctacttggattaactgcgtaataatagggtttaatatatgaagggagtcgatttgatttggacctgatcagaatctaattaatatagaaaccagtggcattactacatgcaatatgaactggaagccactacaaataacccccggtctcggtgtcagccgaacaatggcaagtaagcaaggtcttctgcattgtaacccctctacctgatgacttctcattggtaactgaggaaccaatgtcaatgtggcttatttcttggcatgatcattgaagtcgaaggggaaatggttcaataaggccaattccccggttacgagtaatcaaagccaacggcgagctcgttgagctgcctcaaccgttccataccaattgctaggaggtggaggcggcagctcattgttatccctctaagcttgtaccattcactgacagctcacaccttccagccttggaaataatacgcttaaggggcagttcatgtttggcaggttcgacttgatgtatttgcactcgatatctcatcaaattgctatgttctacttgagcatctatatcattcgccatacaaccctgcaaaaaaggacaattgaagtgccaacgtaactcaagttctactagtatttgccacttgcgaggtcagcttagggtatctcaagagttaagcttactcggagcttctacattagtcgtatgttgagattattatagtcattgctttgcctatattgcttagttcaaaaagatatgtctcttaaaaccaacactctcaattgccttaaactcagacgaagctcatgtatctactattcctagattacaaaggaaaacaattaaccctactaactacataactacaacaacaatatactcacaaggaacgacatgaattgaatctgtgcagacaacgagaaccgcccattaaacgtatttacccaacacagcagcggaatgagatatcaaaaatgagatgtcaagacagaatgcaacaaggcttagacattggattcagaggagcttagtgagtgatagatatgaaatgggcccagagatgaccgtgaggaacgatgtgctagaaggacaggagaataatgagggaaaatgtaaatgaaatgaaagaacagaacagtccggttacccacgctcccaataatactcaatgacaatgacaatgactcagatgcacacgatgcagaaaaaaaagagaacagagttgaaaagaaatgacggcagagaacaagtgggaaatatgcaccgccataccgattagattggtcggaggaacattcattagatcaacacctaagacaagatcctcgaggtgggagggaatatcttgagtttaggatggacaggcgctgctagcgcctgtctagaccaccgagccttttcgagaatgtcgtttttttggattggcggaatatccaccggaagcacattgtatcggtcaaattgctctgaatagagcatacaccaatccataggatcaattgtgatccacgcggacagcacagcttctgttcatgcgatgaaaaaaaaaaaaatcatgaaacaccttattgcgccggaatcgatgcatgtctagacaagaatgcaggctcggtggatatggacctgaccaatatggccagacacaggtcactgagcgatgcaagaaactcccgcccaaaacttaaatgaaatgcgtgtagatcttggaattctcatgaacttccatctcctgtattaatgttagtaatggcacaatcgaagtatagaacaatgcaagtaactcaccatcttgaagttattaatctcctcccgaatctgttgagcaagcaacggggtgagacggttgcaagtcgcaatctctccacgtcgatcgtactcgccgctaggccaggtttcgtggaactggatgcgaggactgaagacgatatttctaccagcaacatttgacggggtgatgggcgcactcttcgcttcagaagacgagaaccgcgccgagaggaaatagtcctcgccggcaatctttaccggatcattttggtgagctggggatcgtgacgactcgtcgggtgtgggaggagcactagagtgcggtgaatcactaccggggagtgcatgtgcaggcgaggagacaccgaaatccgagtgagtttctaataaggtcagtatgctaaaatgtcaagtgtatttgtgtggagatacgcactcttcaagatacccttgcggacggccgccaggatctccgcccgttctcggtctcctcccatgatgctcttacgcgactgagagttctccgatgcggctctttcccgaatggaaacggatcgtctgacctccgatgcattgtcaaccttagggaagacagtagccccacggggcaaatctgcggggtcggggttgacagcgacacgctcccgttctgcctcaacgttcaccacggtgatctgcggggctggaatttcggggatcgcaccctccatggaattgatgctggccacggatttaggacggaacatgccaaccaatgagcgagtggagcgcttcatgcccttgcccatcttgcgaagcatcatcgacgccgaggaggcggtcgatgacactgataggttatcgttggacccggtgaagaaatggccttgatgggaatagatgctttcacctagtccgctcagttcctgctgctcggcaatagcggcttgttccgggccaagttgttctctcagagcttcacggcgcgcctggtccgcggcaaatgcttcccgcttggaagcattactttgtgcagatgtcttgaggagctcggaggcactgccaaacgagaaagcccgtctcaggcgtgatttcccggggcgcttcgtgtccattttcaaatcgttgagacgcttcgcagcaggagaatccagtgtaggcggtggtggctttttcggagcttcggctggaggtttgggtttgggggcttcgggttctgtcgataccggttgcgataatggcgatggcttgctcgtacgtttttcttctgccttgccggtcttgctagtgacggagttggattccgatggcgtcccttctcgtgcctgtgaaattgacaccgttagcgctgcattattcccatgcgaccttgtgaataatcctaccgaggaggccgacgagtgtgtcgagttaacgctacccacgctatcccgctgagagtgagaggaagcaggccgttgattggcatcaaatgtgataaagtcgtaggatcccgattggggttgagaggaaggtgaggtcgggaaatctagcggcaggtttgggtacgccgcggcatccatattgcccagacttcgtcgtcgatatcgttcgggctgggccctatcgacataagatgaatcatccacacttgagacgcgactgtgggcgcttggtcgaactggtcgagggccaccaaaatcatcgacaatcacggtcggaatcggcgagggagcaggcgatgatggtgcggcttccgctcgttgaggggtacgacgataccggttcggggagggtttcggtgacgagatgttcatgatcgggggggagggaaggttggcggtagataggggacggagcggctggtcgctcctcggccgcgagggaagtgcgctatcgtccttggaaacataggaacgggaggaagagttggagggattggatacagaaccagctgcaggatgagaggatcgggggctggcaccggtgtatgtcggattcaccggcacttgaggggtggtgggtgcagaaaaggtgcgatgttctggccggagatgtggtgtccaagattgccgattctggacggattggcccatgtttgggttgtaggcatagggagccactaccgggtggcccgctcgataagtcccggaattaccagcattgaatgatgtccaagacatagtctggatacgagagccttgattctgggtggaagaagagaaggtgcctgatgaggatgaaggacgcgtctgaagcacaggtaccgtgccactctgttgcggaattgtttgaaccaacgcagccatattgttttccccagcaaattgtcccaaggaaatcacgagttgtccagggctgtgatctaaggcaactcgcaaatagaaaaaaaaaagagatagaatatgagcccgaggtgtgttcgtgtcaaataaggatccgaggaacgagatgggatgctgcgaccaaagagctgtcagctatctatcacccaaataagaaccctcacgttgttaatgcgatatgaagggtggagtttgtaaggaaaggggtcgtgctctgcgtattttttttttctcttttgctgtgcacgttgggggggaataaggaaccgcgtcagctaggggggcaaccatacctgttctaaagtaacgtggacatagactatagtggtacaacaattaaaaaaaaggacgcttgatgccagaagaatgaaactcgaaaccaggcgagttggaagaaacgaaaggaggtgggcaaaaaaaagagggagatccctaggatgatgagacgtctctagaataggagagccatgtacaagaagaaaaaagagagtaaacagaatcaaccccaggaccttcagatgacaatgacactcgaatgtgtctgtttcttagaagtgggaagagaagaagaaggggaggagatgagaggagggaaaataggagggggagagatcacggtagacacggggtagattaggtccgggagtacggactccaaggccaacttgaatggaattggaataggaattgaatggaattgggaaatagtatagggaaatggccaggtcagttaaatcggtcaaatagctagccaaaaaagagaaattcgtttctgaactaattatgcttatgcgtcgctttgcatgataggagtacgacatgtggtatttccatttggtatgtctacatctgtctatgttgtatgtctgtctagtattgtctaatacatacatactgactatatacatactacatactagctagactaactagactaactatcctcctacttcactcattaattcacctcctgaagccgtacataaaaaggggcccgacctccaaatttatgtgccaatcatagggctccccttgatgctccatcttgatattcttagacatcttcatagccacgcattctattctgagtcaagatctttcataaatatcttgtttttgtacacgggtccaagtccgaatgtatgtcacccggtacctgaccacagagactcctgtcaaactaacgcaaggcaaccttctgcagagaacgtgggcgaaggaattagcgacatggatccgatcggcctggcaccgcgtcccgcgatttgcgcctgcactaaactgtgacgctatctcggcttttccacgaatccacatgtgttcgaaacatcctaaagtacgtggatttgtacttttggggctttgggggcttttctctgtactttgtaatgcccaaacagtaagccctaatctgtcaattgagtaaaagactccccgcttaacccggacttggagtccaagctgtttccatgggttgtagtaatccacccaagctagttgacagttatcgagcaatcatattgttctatatcgtcttattctatttcataccattcctatctactaatatctgagacacttccaatgtcacactacgtaataaggctggatttcctagttctgccgtacagcatggcgtgatcatatctatagctccgagttgaaaatttagaggaacttaatctattttcgttctctacaacctatacacttgtgtagttataccgccggtcctaaataagctttatctctcaacctcaacggtatgtaaaacgaagccctaaaatgacatgagttcgtcggcgcaacaatccagcttattgacaccgcgccactccagggctgaacctcaactgatctctacttgtaatacctgacagcgttctcctttcagagtcacgacaatatcctcgtaaattcttatctccatcgtcagataccgtacaatccgacatctccgcgtcaaaactgtcccgctttcactccccacttgctgcaaaccactcaatccgtcgatccacatacaagacaacttcccgcgtgatcggcatacacttctttcccactcgagtcgtttagaccatttatcacctccgaacagcacactccatacacaggtggagaataccagggcaccgacctttcccgagcgtggaatttagcgtgcattttagattattgcgtactgagggggggggcccgcgtctgataccgcaaatcattgattaagcatcctgacgcccccgtttcatttaccagggccctgtgcgctgccaatatccctattcaaccgaatggggaaaccctcaacaacatgcacagtacgtggctgatcaggggtagccattcgggcacagaccaagggccagcctttgtgcagtccaaatcccgaatccacacacgctgtggtctgattgtttgacgggtggatatggacgcaaccggctctagaggccttcaacactgctcattcgtgcggagtatagttcatgtagggtgctacttaatgtacaacatacggagtacgaaggacgcatatctccaccgccaagataacgtcccaaaggtcccaggtcctgtgcttgcactagcattgagtcggaagtactaacttttagtatgttgtatccggggaagcacgaggagagcggattggccattgggaatacacatggcgttgtactgtggtattatgagcctcttagcctatttcgctcggatcatgtccgatattgttgtgtcatctgctccgtgcagtgccggtttagggtacacacatgccaggccttcacctttcctaacttggatgcaggggtataaaattctattttttgatctcctggatctcatcgatcttgtctcataaacatctagccaggattatataccttgaatcaataatcttggtcatcctccgaagcattcatatcatcttcatcgtccagaccctcaaagatcatgaacttctcatttttggcatcggtttcatcaggaacaacgtttccgtcttgaacctcgcagtccttcagcacggtttcccggccgatcttactgcgacgtccaacaatggtacccgttaattgacagcgttcgccaacaacagcaccgtccatgatcaaacaacgtgtcagccgagcaccgctggcaatatggcaattagcaccgatgatggtctccttgatcacacacttctcttcaaccgttgagttgttgtccacgagacagtcgttcctcgtgacggtacaccgctgcgcgatgctcgctgtgttcgccactttggaggcgtgcgcgaatgcagacgaagcaactcggccaacctcttcgatggactctagtttagcaagatggagagaggtagatagaaggatggctgacgaatccacccgtcgaacaaaaggtgctgtgcccctttggacgtaagcgagcatcggtggtagatttgacttggaattcttggcagtttgcgacgtaaacttggctggggtggatttggtagtgctcatgctctgtagatcaatctcttcctccagtgattcaccatcgagggattcaccgtcgtgactctcactctcccctagagtgagcccgtggctctggcgacgacttttctgctggaagatttcgttgatcttcagcttctcgctgaggccttgctgccattccgatttggcccaccatccaaccaagtcttcgccgaccgactggaattgctcattcaaacgagccatgtccttgacccagtaaggtaggacgtagatatgcgcatcacggtatgtcgtcagcaatttcacctgcgcatgcgtatccaccagggaatgacgcacaaggaagcccttgtcattttccaatttctctttcaatgtggccataggcatagaaaggactagcttggagagcgaggaacggggcgcggcatgagacacggtaggagcctcattctgctcaagtggcgcaactgccaggaagtctgtagcttcgcccttgacactctcctcccgaccctgtgtctgatagtacatgctgagtccattccgacgatccttctcgccgccacacaccatccatgcttcaagcagagactcgccgggtatttcgcaaactagatcacatggcaagagaaggaagtcggacttgatacacgcctgcacctcgggcagacggaggagctctgctgtgccagtggtcatctcgagttccgccggtgcgatgacagacggcgaagggagtgaggtaagatgtgggttctgtcgtagagcggcctggaggggagcgagcgaagagggaggagtgaccaaagtgacatctagcatggtcagtcttccatccgatgttttgcgacaaagcacatggcgtcacggaatgccccgcatgctatttcgacagtgggcatgggcttaccagtaatgcccattcttttcgaccagtctagggcgtaccagagcatcggacggttggccactgggataaggcattttgggtattcctcggggttcgaggtgaatgtattaagcgatacaccagggccgcacttgtttgcttgttagcttttgtttcaagatacatatatatgggaagctagttgctcacaagaattagagcctgcaggcccgttggtggtacagatactgagtgaggcatgttttcaactaacaatgcacttgcgagtccttacacctagtcatatatttctttgaacccgataagatggaggagtcagaaaaaccacttacataatcctaacctagctggagatggcacgtgattatgacccgtcctctccagacacaaacaggacaaacacgagtaaacacccgcggtaatcaccagccacatgtttctatgacccgaggggggacgcctgcctcctttccctcgtttcgcttctcccaacctcttattttgccaatcgacgtgtcaaatgcgacctgcgagtcattgcgaccgcgactaataaccgttaaatgtgccacctctgattgaacacccgcgatcgcaatgtccttccctcaagaccctcggcgccgccgcggcggagccggaactgggttcagctcaaccggcggacggactgccattggatactggctccctttggccttgactgctggaattgcaactatcagcattgcagcttggatttggagtgaacgaaatgacgacgaagatgaagacgaagatgaagacgaagatgaccgcccccacggagatgaccgccctcacccgcctcctgttggacctggcagtgactacccaccttcctatgctaccggggattatgcccgaagcacaggagcggaagttcttcctggagatgcttcctatgatcatagtatgatgggtcgcatgcaaggtgctttgcgccgcacgcctagccctcaacagatcttcgatggcgcgagcaaaagagttgtggccggtgtcactgctgcaggagcctttgtcggtggcgctcttacctcaatccgtgaaaatgataagggtgagggcgactacgaggaccactctagatggtcggaggaggctcaaaccagggctcacgagagaagccaacaaggcgctattgcgcctactatgagtggtggattgccgagccgtccagcaaatacgcttaataaggacagaaagatcgtcgcaattgttgtttcctcggtttcaccggctgactccgacgaatttccttccgaacatgctgtaagaagtcctcacccttgatacccactttaggcctttctgacaatcgcagtccattctatcccatctccctgaacatgtcgatttggaaacctctaagatctttgtgttgatttatgccccggaattgaaacacgccatcaaaaaggggggctcatctcccacaacaccctctgtggcttcgtcttattcaaacattggcactgaagaaggagtttctgtcggggaactgggctctggggacttgagtgcggtagagccccgccaggacgacgaattggagggcacatctcgcttgttcaaaacgttatacacacaggcacaagcgattgttgagaaggacagcatgatcatgcctttcagtacccctgggggctatgtgcacctcgcccgtcacttattccccgagcttgtttatgtccaagagtctttgactggagatcatggtgaacccgccatccatatcgctaattgggttcgccaggttatcgtcgtagtcggagatgagggtggccgtggtgggctcatcgacagtgacgacgagtcagcactcggcgagaaggaagagaaatggtggaaaaaggagggcgtcacaggactcggcaagcgcattgatgtggttgacgttgtccgagtcggagatgactggagacgacgagtgaatggtctggactaggtcagatcaagttgtggcccatgatttttatgttgatacttgtctgcttgcatgtctatacatgttttcgttttctgttaaaccccctcatgactgattgaccctattcccctgtttttttttcgaattttttgccttcatttgatacaattcaactttgatattcacctttgaccagaataattaatgtgtatggttcttttgccgcaagttgctcctatttccaacatggataactctcatagttagttcacttagctatgacatctgtagaattctagttgtaaggcattagattttggtagcggtatataaaatctattcaagcattgattcatcttcatacatccatccgaggatatatttcgaagtcactttaagctatttcgctctggtctctagccaagaagacacagaagatatccaaaaaggtttacatatatcaaaagactaccaaaaagacacgccaaggtcacatagccgctgacttctcttgtatgtattcaatcagtctcattgtggtatctcattgttgcatccattcaaactagtccgaattaggaatttatcatgtgactgacttcgcgcccacggcttggcatcatcagttgacctacctctacaagacctcgtccaacggcttttccgattcacgccttcctagcagcattattggacgagtgctttctttctttcattccttaatcccactcggtcaatctccgccgatcttccgcattgattccagctgtgctggggaccggtgtcgccctacttatccccacatgtctcgcgcatcggccatctcactcatttcccgagcacggctttcattcaacatcatcaaaccatcattccgataagttgcattcttactcactggccacgccgaggttgcgcaaccggcgcagacatgatggcgaccgcaatttccaagccggcctcccatacacagaagatgaagcggccgcccccgcctttcggccaggccgcggtcaacggagtcaagggccagcacctctcatcttcgccctcatccgccgcaaaacgtcttcccacgggagtctccgtcaacgcaacttccaatttcacgaatggcgcagcccatgtggcgagttccaacaaaggcccccttaatcggaccaggaatcagtcgcaaagacccatggatcagtcctcgcgctctggccggccagtaacgaggaccgctgcagcagatcaggcacatcgagttgggaaaaaagcaccagaaccatatggtagggagttctgtgacattcgcaatgccaatgcgcgcactaactttcttttcatagtgaaaacaacatcctatatccttaagaaatattcgaaatgccccccatccctcattgtgcatctacatcctacacattttcgatttgaacagcaagatggtagcttcccttacaactccgagatgaaggtcatcatcgagcacattcgtgctgggacagttccgcatgatctgattgaggagcttctacgaggcggtgtgcagttctatgaaggtagttatcgtctttgacaggtagtcgaattacctcctgctaatatcattaggttgcctcatcgtccgtgtcgtcgatcacaaatctgcctcggcgcaagcaagaaaggcatccactacctcatccaacgagaacaacacaccattctctctacacaactacaacgaacatattaccccatcagcttatgttccatacccaaaacaaaatcagcttacgtcggccacacaaggcaccaaggccgatgggacatcgattgccaatcaacaaacagatggcccggcgactagtgagcagacggacgacaaaagcatcaacttaggtcagaaaaatgctcccatgaagcctcgagtattcaccacagtactccatcccactgctcgaactttgcaggcagagttgacgctactggtcaccactccggacccgagagccagggcaccaattcaagcaagctctagttcttcagctaccccaggaagcaatcaaccagatcgtggacacgtcgcaaagagacagaaaatgctggttgaacctgaggatcttgtggaatgcgaatctaaaatgatacaggcattggcacctcctctcttcttggatcccgtgcatagtatcgaggctgcccaagagctgttcaagcacctggaaagcccactgcatcgcgacccgccgcccttgcccaagcgccgaaagagaaccgttgccgaacttgccgcggatgaagccttggcagcggaggaggaaagattcatgctcatcatggacgagcgtctggagcccacggcttctggtcctggcggtgctgcgaaggctgctgccgtggatgacgcgggtggtgtggcaccatttgaaccccgattctctcgcttcaagacacttgaaacgattcgcatgcaacacgaggagaaggctaaacgtgaacatgaactgaagctgaagcaggagttggccaagaggcaacagcaggagcaggagagagagcggcgccgtgcgatcgagcagcggcaagccgaggaacacgcgaaagaggaatcgcggagacagcaacttgctgcccagcaggcccaggcccaactcgctgcgcaacagcaaaatcgccacattatggctcagcccaatggcatcagccaaggccaacagtcttcacccgttgtgcgtaaccagaccgcgcttgcaacttcatcaccactggttggtaatatgatgccacaggcggttccgatgaccatgaccgcatctgggtctggcggtagcccaccgcgacctccatctgctttacagcatgcgcatccgaatgtcatgagccacccgatggcaccttcgagaagccagcaaggaccaagccgacatggtactccacagatgacccaggggacaccggctatgtcgcacgccacgccaataatgcgtaacgttacgcctactcagcggatgagtcatggcagtccaactcactcgatgggccataccccggtcatgaatcagggcatgatagccacgccgcaaatgaacgggggaatgtctttcacgccacaacagcagatgatgctgcaacgacagcaagcgcttcttcaggcgcaacaacaaggacatattcagcacaatcagttcacgccacagcagctagcccaactacaagccaatgcacacgctcaacaaaatattcagtctcatcaacatcaaatgctacagcaacagcagcagcaacaacaacaacaaagcagcagcagcagcagcagcagcagcagcaacaacaacatcaacagcaacaagcacaccagggtattcctaaagtttctcagcaaggccagcaagcataccaggctcagctcatgcgtgctcaatatgcgcagatgcaaatagtcaagcagcagcagcaaggccagcacccacaaatgcagggccaacaaacccagcctcaccaaggcaatcagcaattaaaccaacaacagcagcaaatgctgatggcagctgcacaggccaatggtggcatgggtcaaaatggacagcccatgaaccaagcacagagatatacccagctctatcaacaacggctacttcgcatgcgacatgatatgtcgacacgctacatggctcagtatggcccgccaaaccagtatccttccaatattgcgcagcagtatggccctggactggaaaagaacgcgaaagcgtgggtctccgaggtcatgcgacgcgagcgggatggcggacagcaacaacagcaacagcgggctgccttgcaagcccagcaaatgcaagcgcagggctcaatgcacagcatgggtggcatgaataactgaggctagtctgtctgctggcattgatcaaatgtggcgacatacgagattgttgataaccggcgaggacagaaacttctccacatttacaattgaccagtgtaaaacctggctcgaggtcgatttataatgagcatctacctaatggcagtgggtcattggttagcaaccgctcactgtctctgcttttggctttttttttttcgcgttttctttttgttttctgtttcttttctttttcagaaatcccggggttttgtacagggaccaggcatcgtggagattggggaggatggcgttacttttattgctttttttttctcgttcgattgtactattgcggcgcggctttcggtgggaaccctgggatttctcaaactcgataccattctgtacaggcgttatttgatatcacgacgcgactatggggtttgggttggaaattgcattgtggaaatacctcgaatttgataacacaaaatgcaagaactggattctgtttattctcctagacattcgtatagcagacattttgacggtgcagcatcggtctaagcacatctcaaaccaaagctcaaatgtcataccatcacgaggcattcaatatcgctttgaatttttactcaaactaagcccatattcttgaacaggaaaaggataagacgaagcacaatcaaagtgatattcatttcatataaacaaagtctacgaatacgggatgttccagatcttcaatggatgtttgccatctcgggcgaaccgtaggacaaaaatctagtactcactggctagggaaatagttaaatctccatttcgatataagcacttcttcggcgcgaccgcggccatgaaagggccggatcgcaatttgacatccgtgctataagctgaaaagctgtgtgtgaaagggaaaggcacataataatgatggtaagtattcaattagacacataaggtatcagagctatgaaaaaagggagatggggaatatcaaaagatatcgtcagtatgtaccacccagtaaaagaccgttggtcggtggccatcacttcctgagactgttctctggtcaatcgttactcagactgttgagcttgatatttttgaaacattcatggagaagttcatgtcaatagaaattggtgatcatcatagtaaggagagaccagagtgtctcgcgagatgtggagggtatatagaggcaaggctaaagccaatgaccaagggaagacattaatcccttgagcaatggctttgcaaagcgcattgttgtatggtcgagtggtagacaaaagatgtcggatttaatgtgaaggatctacggaaaatctgagcgctgagtttttatatcgtgtgattacataaatgatgtgtcagcacggccgagtccgtggatgactaaactggttcccgatcggggaaggtatcaacagccgagtagttatacatttcaaagatggactcatatgggactttggtgtcttatgacttggagagtactatcacccgatgaagaagacgagtggacataatagcatggtgcctgggctaagactggattggaagtgcattcaagaattaacaatacaatcaattccatcgaatgggaaggcgggaaataagacacccacgaaaatatatggattcttgtgaggatggccacttcgagacctcaagcgagggatgatcgccgcacatcacccgaggaccaagtaagccgagcgaataagaatagccggaccccttcactaacactgataaacacagactggagtgtataatgatgttgatgttgcattgcatagaaatgaatcagaaataactcatactaaaacaacccaatctcagagcctagaagcgactttattgacactctaatatcacataccaatgcatgtacaaagtacatcgtacgatccgtgcagttacatagtcagtgtagatctgtatagcgtgtatgcacggccaatcgaaaagggttctcacatataaacgccaagccagattgccattgcatggacataggtacggtttggttcggatgctagagggcccgtagttatgctattctaaaccctgtataatgtctcactatacgacattctaccctaataatcgagtccatgcgcatagacatgccgatgcggtccacgagtgtgttaataggcattgtctatgtggggagagtttccccctggaatgtgataaaagtgtacacattaacgaaacgttcgttttatctgatattttctaaggaaatctaacagaagaggaaaaagccaaaagcattcgtaatcgctgcagtgagatctctaaatagcaatggaacacgaagcgaaaacagtttaccgatcattcgcgcacgcaatctagaaaagaacaaatatttacggggaaacaatacttcgttatacaggatcaatagcctattagcgggtagacggatgcatttccagacggtatttcttataggacgaaacccaggaatggaaattaatagagtgcgaaggcgatagaaggtgattggatatcattcccgcataccatgccattggacggactccccattcccgatttgtacggcgtggcatatacatagcgcagtgtaactgttcatgcaggacatgggcgtcgggctaatttaacgtcgtgcctaataatcaccacaccgcacaatgtgccaaccatcggtgtagcgggtggactgagttatttggaatgggatttggaattcaagagtaggtggggagttgaggaatacggtttggaattagtggaatatctctgatatcggaaaataaatgaggctagtactctgtatattgtatgttgtacctttgaagatgatagatgggggtatatgccggtaatggatgtgcagggcaaaaaggccgacgaacaccctcctttggacttcgaagaacggtcagagattccatgcacgttgatcattagtggaaaaaaaaaatacgggtttgatccggaggtcaatgggtcctttctcatagggcattgatctcttcttttgctttgctcggaaagcgctcatgcccgtggacctgggaatgaggaatggggtgacgcatgaacacccacggtggcgaaaatccaggcacgtaggagcgcggctctacggtgtgggatccttggccatgaagcatgtccaatgtagcacgaaattatctttttgctttttctcattcccgtctcgtttctatacttgctttttcgcggtgctatacttagaactatggagtacgttggagggtttttgcaaggttcaagtcttcacagagaacgggtgaatggggctccacatggctgtctgatacatgctactagcgatattggtcgcgctgtcgaaagtggcgcaggtcatatagtggagtatcggctgctcgtccattgtggtttgcagtacggagtagtgtttcagtgcatattcggggcactgtgttccacattaaaagtataggagtattctaattgtagacgaacaatgtccatagccgcggtgtagagatgatgacatggcgtttctgaaacggggtgatgagaacactcccatttaggagtggaatgtgtggagagctccgaggacagacgagtgaaaagtacagtttgaccatgatcatgtctgcagcaggctcgatttgtgccacattgatccacttcatcgaccagatagatcggtttggagagatccaggaactaaagatctagagccccgagggttgtgatgtgtaacatttttggggcatgtcatagctcccccaccgtgcgagtggcgaagtgagcaggttccaagctgtagcagtctagcccatagcccagaatcctagtaagttgttaaaagggaagtggtatacaagaagtggaggcaacgagaatgcagtgcaacaatgtagatctgggttttttgtgtatattatgccagtgtgcgattatgggggtggtagtacaagcaataaatggagaaaaagaatagaacaacaacacgttgtagcagattgtacacgatcgcccgacccctgagggtgttcctcccaaatgattatcccagttggcgatctcccccaaaccagaacgggaaaaaaaagagaaagacatatgcaacgccgcatcaattccatgttcagaaaataaccccagcctttggcaccaggcaaattatgcaagagaaagagaaaaataaaagggaataaatcaaaaaagtcgcctctcctccaggagacatgtacaacgccgggcgagaggtcaatctggcctaaaatgccagtccgccagagacggggtatcaatagaggccaagggccaagtttgggttttgtgtttttataattccatattttcctctggaagactcatgtggaattggattttgtgttttttttgggagtttttcgattttcgattttgttttggtgcggtcattcggctaatcatcccagccatcgacgctcagctcgccacagtcaggcatagtatcttcaagcttgctgccgtagatgggccgaccgtcgggagtaagttgtccacggaaatcagggtcgaaatcctgactggtctcatcgagagtcgcaacgtagcggttgcgaccgccccgcttgctgtgggtcttggtgtagtgagcgttgaggttgtcgctgcgggagaatgcacggtgacatccaggaacccagcagacatgaggcttttccttggagtggctcttcatgtgacgcttaaggtgctcctgacgcttgaaacgccccttgcagccaggctccttgcacttgaactgcacttgcttgatgattgacggcaagttctcgagactcaggttagagcggaggagctgtttcttagaggacttgcgcgagggctggcggtgtcgttgcatcatgccttcacgataaactggggagagttgaaagtcttcctgataatcattgtgtccggacattcggctgaccggagtgtctgatcccgagggagtccccatagagacggatcggtggggggtagaaggagtgtgggacttgaaagttgggatattggtggggaagtcggagtaggaagaagatggaggggtcacgggtcctgaaggaaagggttggacctgagccggggtgatggtttgaggtaccaaggactcgtgggagggcatccagtggagcatattagacattgaggcggaattaggcatccgctcagtgggttgggtaaagattggacgagacaagcaagggttggaggccgattcaggcagatatccagcctgttgagggcggtggtagtagttgcgagccatctggttgtactgaggcatcgaggcctggtagggaaactggtgctcatggtatgtctttggcatatcctgagggatccaaagttggtcgacgttctcatcatacccaggaagatagtctgggaggggcatctgctcctgtcggtccatcgtgccgcagggcatacccatcatggtttcgctcgaggtgagatccgccatgcggaatgcgctacgtagcggggtagctgaagttcgacgctccattgggacgccgtggtgatagtgaggatggtcgtgccatccgggtgaggccattgagccttggctgtaaagactggtaggcgtgggagtcggagagtccaaaggagaaaagcccgaagtcatcgaggggcattcacttgagctcaaagagtggcagtcaacttcaacggtcaaacgatcagagatgtgctgtccgtgagatctcatatcgtccaagtcctcagtcttgaaaggccgagatgcaaccgagttgatagtgtcacctgtccgggggactttagcaattgttttgtgtttttttttggtgtttgtgtttgtgtgtaataaggaaaggcaaggtcaagcaattgacaagtagagagaacagagcgagggtcgagaggtaaagaaagatcaaatgaaagtaactataaaagaaaggcagggatggaaagagatagaggcaaagcgaagacaagagaatgtgtattaggtcccggagtatagggaaaggaaagaatgttcaaaagcaaagggaatggaggacaaacgagcagaaataaacaaattggtcctgcgtagaatcccgaggggtggagatccgacttacagctatacgccatggtctaagctctgattcggacttgggaccaaaattagagacgcgtcgcgtgctagaggttccaagcaaggctaggaatgtagactataagatcctccgttaccgcggcaaaggctctaacggctggatctgggctgggatcgactgaagtgcctcgaggcctgcaggtttgatcgatgtttcgcgctgtttcgcgtccaaacgggacaataaggtgggctggtatggaacaccaagacgataggcgatgtattggtgtcagaagccctttgacgcggtttaagatggacggttgaaggggaggctgggtctcagattggatcaatagaggtaggggggtggtgtataagtgtatctggcttgaggggaggggagattataagtacagcaaggagtagtgaagggaacgatgtcttaaagagcccggaaatcagtaaggcaatgagaaagcaatgatccacggggaagcttgttcctggtacctttttgggccgacggtgctgcttgagagatttggatcggcgtccctcgccttttgttttttttttttttttttaaatcggtttaatatttagtattattgtgtatattgtttattcctttggctattaatacaagattaactaaaaggatcaatagccagaataatcgggaatcccttttcggcctacccactttatagtacctcacctataatccctattaattctggttcatgcatcattattcctctccaccaatcctggatcatgctcgctgtactccattggaatgtctaggctgtacctcttaggttccgtgaaatgtgagcagagtctatttgtacatgcaggtcgatctcgtccccggactttctagccgtgtcgatcatgatgcacaacccatctacgactctatgatctcctattactctccactctaggtctcagaagcaacccttgacggcgaaaagagtatttatgctcctgtatttactgtcaaaacaaaaatacccaatatttaacaacccgaggacacccagagacacacggaaataactataacccaaaaatatgagctcgctcggacgatagtggaggctggatcgatctcattcgtacttttgcgacaggtcagacgtttgaactcattcgggtctgtgcaaacctggttgacgctgcatctctcccggagagtagcaatctcggattccagagcttccaccgacaacattcccctattcctccgccttatttcctctcgccaagagtgtcatcgtcactggtggatcggccattgtatttttataaaattcaatttgtttgatactcttttatcttatcttttcctacctgagtctagtccccgcccctccacccccccgacccatccgccccacgatgtaagccgtacatannnnnnnnnnnnnnnnnnnnnnnnnnnnnnnnnnnnnnnnnnnnnnnnnnnnnnnnnnnnnnnnnnnnnnnnnnnnnnnnnnnnnnnnnnnnnnnnnnnnnnnnnnnnnnnnnnnnnnnnnnnnnnnnnnnnnnnnnnnnnnnnctccacccccccgacccatccgccctacgatgtaagccgtacatacctccagggggtccccgtacggacaacaaatcaattcagtcattcggtctccattggaatgtgagaagataaaaaagcaaaagcaccgcaagcctcggggaacaactgtcatccatcccgctgggtctgcgaagagaaaaaaaagccaatccgccctaacggttcggacggtgtcgggctaagctggcacttgcgtctgacccatcacgcgtcagttgagacccgaatgatgggattgtcctcgatgttgcattcattttgctctcgacctgcgtggctaatagtcggaggccaaactttcgcattcttctttggatgctcgttccacgaccgtggccactcatttgaaacatgtccccgtccagatagtgatcggcctcgaatgtttgtcaccgctgcaggtgtgcgaaatgggggaccggttctccatagtaatgggaattctgttatctcactgtttgccttggtatcacatcgcgtggatggagatgaaacagggcttatccgtttgaccataaggctaacgaatttcgccttgagaaaaaaaagccgtactaacctcattttagcagtcagattaggtttcaactggactacaattgctggtccgtacttcttttcctcggcccctcttttttttgtcgatcgtttatcgctctcgcgtcgatctgtgtccgccagtgcgatattgctctgtatcgactgtcagatctagcccccgacaagcccccacttcacttccttctatttcttgcatctcaactacttccttaaaatccttcgccacgctttattgatatacctgcataactatcccccatgagcttgaaaaccggtttgacacgcttcttcggggtctattgacaagatgcatttattcctgcagttagtcaagactattgtactttgtgtgagtcccgaaaacctggaacctggaagtgaacgagccccgccaagacctaagctaacggaggttgtcccatggactttctgacttctaagtttttggttaaggttccctgactcgggttctatacatcgacggagtacataaatgtaaccttttaaagttatacatagactttcagtcttgatatctacaaatggagagaatctatctgagcattttgtagcctgagcattttcgctgatcaatttcctaatgcttagacctcagtgcagcaagggtgaccgaatcccgaaccccaaaacagaaaggtgttcccccagatctgtcggcccctgcgtctgaagggacggacttcaccttcgtatagggtttcccttcaccacaaacccaccaaatccgtcttcatgcttcacttttcgacactagagaccacaatcaccaactagatatcgtattgcagtcgggcccgttcctggaacctctagaccactgctaaagtacctactcaacccgcctaatccaccgcaatgtcgtgatcatcgacgctggaaggtttcgatagtgactttgctttcgtcgcatcgagtcatacctcaatctgcacagccacctcagcctacctggtcgcgccacccgtagagtgtgatcgctggtggcttgtgaatggagtgtggcttatctggggtgatcgtcgagatatcgtacatcttaagatctacagtgagtctctcgccaccgctgttgactgcgagatttttgcctgtggttttttggggctctgggatgacttgttgaggctctctatgtatgatcccctgttgatcgcattgcttggtttcggatatgtgcagcggtggcgagtgaaacatcgaggcagactatctctgtccaaagtacatgtagttgccctttttcggtaatcacatactacacgattacgtaccattgctgcgtgagatcccaggctagatacaactatgttgtacctcaactaatattgtactatctattattgtgtccactcgatgattgacattcttcggtatgcacaacactgtgtctgagggcaagtgctgacgggtgccactgacgcaactgcgaatgtccctgaattgtacttcggatttgtgatctcataccaatacttcaataggttcgatatgcaatctgcaataaaggttatcagcctcaaagcgcctgactactacgatcggggaccgtgcaactgaattcaaatgtcccaaatcgggttttgttgcctctatcgctttttgcctcttatcgaataatttggccgagtgaaacaagcattgtagaattcacaaagtaccgacaatgatttgtctcatagaataatttggcatttgggtcggatgatgcagggacgaagttgagcggcctataggaagtaagcatcagcgataggctgcaaaagcgatcaatagtacacaacataagaagacaggcacagatgcgatcatgcacaacccccgaaatggcacctagtgctctctcggtagtctctcggtgttgccctggcctagcaatttcccccccgtcaccccgcccccttacttttttatttccttttttctcttcacataacggtttcccgttcgctcacaatggcattaaaagaagatttgatttgctttttcaattcgcttttcctccaatgaatactccacgttgacttgcattgcattgccttgcatggaattgttcccggtttccaggaaccagcttaattgtggcaaaagtctatgcgcttaccctaggactctaggtctgccctattgaggtattcttgcctatggtggatcctcctctaaccatcttagtcgcactttagggattccccaggttgaatcctcgtgtgcccgtggacatcgtacctgtctgccctgtctactccttagaacgcgatgtgagtcgcgatgaaggagcacacataccactacgatacttaataccatgattcgcgactccatgtgaaaaaaatacattaagtttctattgcttgaatggttgaatcaaaaaacaataagaaaaccttacagtgtcgtagagatgcagcgttgcaataattccgcccgtatcacataccagcgcaagcacactgacctgctctattattcactctactggcccatgcatgcccgctgccacaatcttatgtaactcagtccatactccagggctaggaccaaagtagctatgtacccacggtaggataagcatgcgcccgaaaaaagaaaagctaggctcgagtccccaataagagccggatcgaccctgcacatcggactctctggagaatgtcagacatgggtgctttgcaggacccctgcagcgcacgaaccatgtctagcctgtgcggtcggcgacagcgcgctctgattggtgtgattgcggatgatcgctggtgggaattcggtgatatcatattattggggcccttgcgccttgtcggtgcttggctggcctacttgggagacgtacatgctgttataagatgtggtttcatttttgctacatattggctctagggccgcgactccagtgcacgactatggagttgtctcgagtactattcttactgtatcttggtttcggggtgtcgtgttaaatttggcttgctaggaccgcgacgtgtgcttgggatgaactcctgtgacgcggattaaccagacagggtctctgtatatcattcttgacttgttgggtttatacgcgctctgtgccgccttggattgggcacggccggtctgtgctctgactaaagagtgatcgtcgtaagctcttcgtataggttttctgagcggaaatgtgaagttagatgactagtgctgaactttatagtcttatgggaccatcacagcaaaagtatagcaaactgatcttcacatgggctattccgttctggggtttgacgtttctgatatcatttctggcgtacttgtagatatcctcttccaatccttgtccatctactcaagcgtaagaatagcggacaacagctaaaatcgtaaataacagaatacccaaagcagcctacatgatgattcgagaagactgccgcaaatgaacttgatgtgggatctactagtagttctgggatgagtgtagtgaaagaaactttatgatcttatggtggtatggtgtgatatttatcgagtggggttctactagcgatgctagcttgactgaggatgattgcacttgaatagcaagatgtattctatatcggtagggatatgctaatgtgcgatggctaatctacatcatactctctcaaattgtatgttctacgttcttgaatgtgaatatatatatcatgattagaaggcacagaagacatagatttgagtatagcgccttctggattatttcaagtacagaagtatgtttttctcaccatcatcaaatcgtatctttatttcatatattaagctacgtgagcggtgcatttacttttaattcgcctaatcttctcttccagttgggaccaagtcgtatagcagtaatcagcagtgtggtggatatttgactcttgtctggtttcgaattcgagagatcgcgtccgcgctcacagctacatttcgaagtgttggactcaacacggtatcatattctggcagctacgtaattttgataaaagacagtagaatttattatcaaactaacatatgaacggagtgaaggtcagtgagcgatgagaccgggctggacatgtgacactgatcacatgactatatcaactggcccctccctgtcccacttttctcttctcttccctccaaccacaatcaccactcgtatacaatatacatcctggctagtccatcacgatatttttaattaatttggggatgaggaacgctggactctcgttcgaatagaggacagaggatttaccctcactggtaaagcttttccgtcatgctttcatacccctggttcagcgacatctcaaactcagacctaggacttggaccagatgcagtctcgaactggaagcgcaaacaactacacaccgaattgaattgtctcctagagcatggaccgaaatgggcataaatgcatcctctccatataaggtcaccgggttacgactggcccgtataattcaaaaagcgaggaagaaggaatgagcgcgtgacaggaagcggttcgtaacatttttggcaagaaagggacagagaccaatgggaacaggcaattgtggctggcgaagttgccaggccagcggcatggacaccgagcgagtgaaaaagcctatgaccaatccggatcaggaggagacaggggaaaaagctatgtctactgggtagatgctttatggcctcatcatcttgtcgcgactaaaccaacgaatgcccccatggaccttgccctttattgcctactctgagggattccgagaaaaatcctccgataatgacctgatgcctgaatcagccagagaatacgaaacaagctggatgattgggctactccgagaagcagatgctcgacgttggaccgaggaacggcatatacctccaccacgagaaatccatcatacgctccgggcagattttcactatcacaaccgacaagtctgcgttcatatctgaacctaagactggtaattttatcaggtgccactgtgggcatccagccgtgatatttgtgatcatccctggttatctgtttagtagtcatgagaaatcaagtctaatgaacacgtcaacgggtcaaagagtaatttatatggcttgtatattgaatagagtaattatcaagcctagaaaaaaaacaagtaagctatgtcgagtgacagattttcttgcatgtttcttgaaacatcctcgtattccatattggccgtgtgacttttatgtgctgatcggccgatgagagctctcggttggactctagacgaagacagatatgatttgccttagaaaagacaaagaatcagggtgacctccagagaaaagacgcaatgatctgcacaagatgtgacagtgccgaccctggatttttgggaaagggacgcgtgaaggcgaagaacgtagtaacaacgtatagaacttgggcaggtcttgttctacagtcgacatattttcggccttcaggttaaaagaagaggactcccataatcgtacatatgacttgatcccttttgattctttgctaggtgactcttatgcaagacagatctattaccatattgcgacttacagcgagaatcagttcaaaagccaaagcctcggctagctagaccacgcgaggacatggaatgaccaaataccgatctgtctatatgctgcaagcaagtagctgcccgcttagtccaagcccgaaccatttgaataggtgcattgcccaaattcgagccgtgataccaaaagattactaggacgaacaggtattacaaatatctgaacaggtagcgaagcagaacccaagaaccaatgatctcgacaagttcccaggacagacaagaatctcatctccgacaaatgcaagcccaaaaccgaacgtgtcgcatcttgcgacgtgggtgccacccgactcccgcttgtgtcgtgcaacggaaagctgcagacgaaaaagaaagaagggaaaaaacaaagagagaaaaacttcgctcaattccccgagaaaatcccccggttccggggcattcaacatctccacaaatcatgcggtgttggtctgattcgaaatctcaaggcgcagcttcgggcgcatgcagaagacaaaggcgagaccagtggacgggaacttgcagttttgcgtggtcaagtcaagaaaatgcggtcagcattttcgtcctgagatatcactgcatataatcgaagcctcgtgtacggtcagatatcttcctttataatggacccggggtgttgatttgccgcagacattgaagatcgatatgttccaaggttgaaggaccgaccggctcatgctttggggctagaccgatgtgaaaaaccaacatgaaggtggggttgggtgttgggaagatgcctgtcggactgcgtcgacatcgagagcgaaagaccgatcgcactacccaagaccacgttgctcttcccggaagcagggccctgaacccgtagagcgaatattatcgcttatattcaggggctgtgacacgttgtgtcctttgatgctaactcatcatcggccttcggatttaaacgtgcgatgtgacaacgtacttttgagacatgtcagatcgagccccgaactccgagctccgagtttcaagataacaagtccctggaagaatgggatatgacttgaatggagaacaataccaagctgatgtcgagataaatgtgaaaggaaacaaatatcgaagacaaaggaaaaaagagggggttagagtaccctggtctcaactgccgtctgtcattggactcggacaacgcacaaacaaaggcagcaaattagagcggatggcgtcacaaagataaaaacaaccttccttctcgacattccaagatatctagggcgccctttcttgaccttttttccaagacaatcccacaatcgatacaatgacaggcgagacagagccactattgggcgcacacgcgatcaaaccagcccagcatccaaagaaactactggtgtccatcgtgtgcgctgtattcttgatatgcgccgatttcggattcttcatgtccaccgcgccgcagattgcagtgtatgaagatatcatctgtcgaaactaccaggacactcttcatagggcgggaaatgagactctgagttcgccagtgtccaatccgtgtaaatcagaggcggtacagggagaattggcgctcgtgatcgggtaccaaagtacatttgatgtgatgcctggtaggtatcttccacgatatactggacttggggatcctgatgcctgaaatacaggtcttatactctcgctgccatatggcgtgctgtcggatcgttgggggcggaagcctctcttgtatcttggcatactaggcattcttctcggagagatctgggttaggatagtttgtaagttgtttgaacttgttactcgataatttcctgatcacttcatcttaggtctgtggtcaagtgtcattcccctccggatggtctggttatcagccgtgtttaaaatcatcggcggcggcgaccaagtcctcacggctattgccatggtcatagtggctgatgtcttctccgacgatgagaggtactgttatggcccgattcattgtgataaagctaacaaatatacagagctactgcgctcttccgtttacaatcttgtatccaaatcgcagagattctggccactccccttagtgcttatctgatgaccttcggtccaatgttcccctttatcctatccctatgcatcatcaccgtgggaagtatcccacccttcttcctgcccgagactctcagaaacgcaaaaggaaagcaaatcagcagagaaggtctagaacaggacagcgaaagcgagcagccccagcccccgaggaagacggcgttgcaggagctcacccgacaagtgcgcgagttcgcacagtcgacacgcttcatttgggccgattccaatgtctgtctaatgatctttgtgatgttcgtcacagtgatgagtcgacagtgcaccaatctgcttctgcaatatgtgtcaaagaagtttgactggagtattagtcgtgtacgtgcctgtccctccggtcgaaccaaaaactaaccatgctataggccagtctcttgatctcattgcgcgggatattttccctcgtgacctatttggtcataatgccaatcctcgccattttagccgccaaacacctgaatctccgtggaaatcgtagcgaccatttcctgagcaaaggcagcggcgtgctttcaatcattggatttgctattatctccatagctcctacacccgctatcttggtaggtggtcaggtcgtcttgtcaatcggatcatcatttatggtcaccacacgcagtctggctacttcactcgtacaaccagaccatgtcggcaccttgtattcggcaattgccattgcacagggcgcaggaaccctcctttccggtccactatttgccaacctcttccggttaggcatgcatcttggacctgattggatgggactgccgttcttccaagcctctctctttttcgttgtggctgtcaccgccgtttggcacattcgacttggaccatctccgcgaaccaatgacgaggaacaggaacctttgttgtcgtacttctaatatttcttcagtcaatttcattatatccaagcaattcaacacggatcccttcatgtggagagttatcgctgaaccaggcgaattgggtgattgagcctccatcaatgagcatcggaatcacacagatgatcgacaaggccgacagttgtaaacctaagtacaccatccaagctatcgaagcagccctcggcgacgtcgatgacccgttaatcgcgatatcccgcactacatctaaagaatacagcagaatttcatttattaatagaccactttgaacgaaactgtagaagaataaatacgcatagtctgctcagtttccatcatccgatctatttcatacttttgaataaacatgatcattcgaccctagggtaacaataatcttcatggggtactccgtagtgacaacagagtttggttggcaaaatataccatcaaggtataatctcaagaggtaggaggacacgcagcatgccagtcgggacatggaaactggcgcatacagcttgacgacgtcatttgcggtcgattcggggcctaagtcctactcggtatgtccgcggcactggtttgctgccgtaggtcccgacccatcatgggtctggtttgctttcgcgggtgttccagcaagacccgtatcctgacatttcgttctcttgtcatgatgtcctgactcatcattggtctggtcttcgcttctgacttgttctggcctgcggtcgatatacatcacgtagagagacttgggcggaggaaagccgaacatcgttgaagtacagctgtcctaaccggacgaaaaaagggcatgaggccaatcaaaacatatatgctcttcgtataccatggacctaataacgcgctgcctggtatcgatatgatatgtaatatgtaatagaaattttcatatgttaagcccgttctagacaatttagtgcattctcttgacgttgtatgcgaccagagattatgagcctgatggccttgagtagaatcaatgacggtttatacggcgggtcattgataagcagacatttccgaggcggcttttgttttagtacatcgatagatggccatagagacagccttctgttaaatcctcttctactggataagctattgctagaatcgtaatcaaggatagccaagagagagacgccatattagggttacgacagaatatccattatgcttagagtgattaatttctgaaactgcatgaatttatgacaattctgaacagaaaaaatttgaaagtctaaggttctaaggttctggaattatgggtgtgtattacaaaaatatccccttccttttattggaaatgttgtttcaaaatagcaagcgctttgatttgatactgtcagcaactgttgaacacttgctcttaaaatgctaagagcgctcagaaattttactatatatcgacatggcagacctagattatctttatcaataatatgtcgaggtaagaagggaaaggggtttggtacaaaggcagctgctttcagtttctgattgttcaaataggtgcatccattacacaggaggagcttttcgcttatactaatggccattttcttactaacgaataataccagctaaacagaagatatgtccggtttgatgtggataagctttgtaatactactgtaacagtcggcggaaagtctagttaggtcacagctattgacaaaatggaaggaggtttcagtaaggcttttttgataagaaaggaaaatggatccgaagtgatagcaaaaattctatgccacattgctggcccgcctaccttaacgacagctggtgaagtcggcgctctcgaatacagtacgttatattggtataattctacttccagtggctaatatcctataaaatagtcagaaaacacactagcatccctgtccctcgtattcttgcctagtcttcgaataactcgaatgctgtcggtacagaatatatcatcatggagaaagccgccggtgttctactgtttcaggttttcgtgtgtgcttgatacaactctttcagaattggtcggaccttggattttctggagaatgccctttatcctttacgtaggagcaggtcgatacgcacgatcgctaattctctgagtatcaagcttggtataagattcaggctcttgcgtaagaatgccttgacactgatgcggaaggatgggttgtaccaggattggatatgaatgagaagaggacgcagaataaggaattgttgactatgtacattgaaagcgttgctagggagaaatctgtagaagaggcgagagccatatagcctttcccggtcaaggcaggagtatgatttgagaattttattatactagattgacagataaatagaaagaattctggaggctgtcatgatattttttacctccataggaaaaccggaggaccagctgacttaggccatggtaaataacgactgccgtccctctcaaccaccaactaccttaactttataccgcacaaaacctggagctaatgtatgaaaccgggtctatgtatatctcctgaatgaaaataagggaaacgggtttagattatacttagatcttcgtagacagggcagtcctccgtatggaaagtactcttggtcactttcaatacatttttatctaagtgaaggcggtttatagatgattgcctggggatttaagactcttctgggtcctcgcgggctgcaatctagttagcgcaaggatagacggtaagtcaacggttacaccctcgtctgctggcacaagaaagcttccatcgattaaattctcccagaactctgatgtagccattatctcagtatcggtaacagaaccaggctgctccacctcatcatagccacaatcctcgtcaacgtgaatcacgatatggttagatgccgagtccaaaggagcaggatcatctctaatcactatgggattggtctctgtgtctgactcaggagaatcgatgaattcgcatatgaccacagcaggtcactctgaaggttcagctgggattgatgttaagatcgcttcttcccaggttctgcaaattacctggtcgttccctttgcattgtgtcgtctgaatttaagaggtggatcttgattcaaagagtgggagcactccaagaggagatggtatcaaggtctttgtaatttggagagctgtggtcggccatcgatttgttggaaagggggagtcatacctctacacaagtgctagctcattcccgaatcagttttctatacagtaacgccgcagaatccctgccactggtttcgaagtactaatttattttagccaggggcgcttgttatgagtcatgcgacgttaaaaacatgattccgatgcattatgccatagtccagggatctgaagagaccatcgaagctttgattcaagcaggagcatgtgtagacgctggcaccgtgaggaagagatggacacgaattgaaaaatctggcagatggaattaccatctttcacctggagaccaaaaagcctcgggaacccggacttctcatggcttaactccacttcattgggcagcactcattggccacccggcaatgatcaaatatcttctttccaaaggagcagatcccaacaagtgttatcaggacggcgacactccgttgcaccttgccatccgagcagatatcattcgtgataacaatgatgcttggaattcatcttcgtggcgaattgaaatctacaatgatttagttgaggctggaagtgaagaggctgacgatgcgcgtcaccacgtatccgaaattcgctcggctgtaatcgaagttcttctctcgcatcctagcatagacgtcgatcttcagaacgagcaactgcaaactccattgcacctggttgcatgttgcaaagatttctcgatggtttctttttcaagattgatgatcaagaaacccgataactcaatttgcaactacaaaggacaaactccattacatcttgccagtggcgcagggaaagctagaatggttaaacatcttctcgctgcaagagcctcagttgatgttctagattccgaaggatcaagtccccttcaatacagtgttcgctctggaaagtctgctgcggctgttgtcaaactcttactaaaatgctatgacatgactcagttgaattcatgtactcaaaaagatggggcaggcaaaaatttgttacatcactatcttcaaacagacgctccctcccaaaagctaattctcacgttgttgaatcatggcgcgaatgtgaatgaaatcgacacagaaggcaattccccactcagcctttgtctgcgcacgtctaatttgatatttaaacgagcctcgatctgtcgcttcctattgaaaaatggcgcttccattttgtggactgatgaatcagggagaaatttggctcatgtatcgatgcttgcttatccttggatgccggttgatggagttctctcgaccctgtcagagttcgggatcgatatggcagcgaaagatccaaataatcggggcatacttcatcacggagccatgtatgggtcggtaacccaaggagttgttgaccttctacgagggagcgggtcacttagcctacatgatcgggacaatgatggtagaacccctctttcatacgcagaggctaagctgcatccgaatcggggattctcacggaacagacgggaattgactctcgatgttctattgaaggcggccaatggagactgaggaggatcctggccgatttcaatccacttgctacttttcaacgcccgtgcagttttatggctttctatagattggttgccatgtcgcccatgggactgcaacgagcttagtctatgtcgccgttgccgaaaaagtatttgatgttctcacggaaactgcgtatgaaatatccggcctcataactctcctttaaccgattacgccttgttcagcctgcagggtgaggcgggtttcacattcaaacgaggctgtctgccaatagttttcatatcagatacacagagcaaggtaccgcacaaatgactagcctgcccatcaacttgattcataaccacaccacaacgatgctgctattcctacggagctgtatgttgttatctacggccagtatcatcaccactggatcaattgagctctgctagccagtctttccatgtctcgagataaaagacaaaacgcgcaagactggccagcacggaggcacacaccctgcacatgtccagtccacacaacttgttcctagcccttgtctgtctcatccttttatgaatattgatcatggaaacaacggggactacggtcacaagcgccttgatgataaggccgggacgcgtaggtatccgggatcggttgcgcgatagactagtgtaaaatcgagggagctggatatttccgcgcgaatcaaggcgccacctcacagctttacagatccgaaggccgtttggaggtatcgacatgaccgccgtgaactattgcggtcatcgtcaaaataaaactgcctgtgttagtcgcatcaattgcgcttactgagcaagtaccggctcacgcgaatcgcagctaagccagtctgatcaatcaattgagccgagtaatccgagcccggtcatcttcggttccatattgaggctagcgcccttcagccaaggctgacgacaaggctctcgcgcggtgtcggccctagggcagattttcaggcccgctgcacagggacaaatattctgaaaacatgtagggcggatgcgcctgcatgcgcggaggccaaatataggtcggcggattgacacctgacgccatggtcgggcctgagaaggaaaacagggccggaggagggcagttcgaatcgttcgaattgcagacgcggggtcgcagaagagccgacgagtcacacacaggggaaagggggtggcggagctcaggagctcggtgatccggatcaatagcaaaaatgcctcatctgtgaggcgtaggggagaaagaaggcgaaaaacaaaatcggggctgttggatggagggggagagcaggggacctatatagtaccacgcacggggaggcataaggacaaagagcgctaaacctaaggggtcaagactaaacctaacggagcaattcgcagtccccatccgatatggtgtagtggctaacatcgccgtctctcacacggcagccgggggttcgattccccctatcggagtttgttttttatttttatttttttctttccttattgtatatagtatcagcatcatgctagtcacttattttgtatctggctttctcaaggaacaagaatgtcattggtggctgttccagcgcgggtggaatccatgagtcacacagcctcctaatggataccaagccacgatcgtattctgagtcattagcatcctcgagggctgatttggcctatcaccaggagttagacattatcacttcctgcgtactttacctacaggtatgactgaacgtggatcatcccagaattacatctccagccgtacagggctgagtcgcgactcgccaaggtgacatctagattaaaataaatgtgtttggcctatgcccttggggtgatatatataattcacctcggtttccaagttaaataattaaagtcaacttgaaaagcaaattgagaaccaactcgactatcagaatacttgaatcattgaaaaccatggcttcgaataatcagagcgatacagatgccgatatgattacggggcaagagacatcctcattcccagcagtgtcaacaagctcgcctcaaaagcgggatcagcgaagtgtttcgcctgaatataaccctaaggctggcgaaaacagactacgcccggctggaggtaggtagtttgaaacttgtatatatcgccaaccctgctaatcggactgcttacagacatcatcaatcgcattacctgggattcggcatttgaacgcagcaactatgtcatcggattcgtggaccgatttgaaggacaattggaagtcaccatgggcagttggaagaaggagaccaccgatgaagaattcattccacagcatcgggtgttatatatccgacacatcaatggggacattgtttgggatcgaaggagacgtattgacaagatctttttgagtggaaactcggcgttcaacgaattggcctttcttgtctaaagattgaagtgaattttccgtcgcaccttctgtttttcctgtcccttcctaccttggaaccttggaaggttgacttctgtcgtccgttgtctctgtcattttagaatatctccaacattcatcacctcatgctgaatgacacaatgggctcttctaagaagaagccgtctttacctcgcttgaccaccaacatccccctactacagaaaccaactaatgcatcatgcaatactttgctacccaagacccttccggatgccagtgtacccccgatcatcatgccagagaggccggcaagaacttcatcacttttcaaggaggacaagcacgatgaggaaaatatcgtgcccgtcacgcgttttgcgtcagagagcatgcctgtctatcttccccagaaaagtgtggacgattcgccggtaacaaagacgaagaaattgtactacgaagatgcatttacggctcgtggatcgcacaactcccccaaggaccgtgtgacccatgaatcggtggttgtcgttgagctcaagaccaacaccaaggtttgtaacgtgctgaaattcgctcgatgattcctctatgctaacccaccaactagccaaaggataacatatccaagttactgtcagatttcgcccacctccttgctcaggtctaccagcgcccggagacatcaatgctagtcaccatcgaccaaaacgctgacttgctttttggaactacctccggttctgcatatctcttgaaggttactgctctctcgagtttgatcggacccctcaccaacctccgtaacacgggcctaatccaatcaatcatccaggaaatgtttggaattgcgcctgacaaaggagtggtgatctatatgcccgcgagtgaagacaatattgcaacgaatgggacgaccgccaggagtgagatcgaccgcctcgaacgaattaattccagcaataactcttcgatcttcaagtctctctcgcgatccatgagtcgtcgcatgaaatcgagcagtggaaacagtattccgatttccctcacttcagttatgagtcctgacgttgcaacccctacttcaacttctcctatcgcttttgcttcagatcaggcccctccgctgaggtcaaaccaagcagacgacaaaaagccactacaatcaccaaatgcggaacggacccagcaggtctcatccaaggacgagaaacctgaacgagttttaaagaagagagagagcctgaagagttttgttaaccgtcgcttgggcgagttgggcgagctgactacaatgaaaccattcacaactacaaagggaaagaaggattgactgctgtttgagaatcgcaaagtacattgcagtggataatgtagttgattgcattggggtatcttcttaacagggtttcggcatatggcttcgctgtgtcagacaattcagtccatatgattataccttgcatccttggccaactcttagcacgaaattgagtgaactgacctcttgtcaatgtaatatgtatttctgtttcgcttttgcttcttgaattctaaggtttctatatatcatgttttttgtcaagttgttagagatactttgcccgtgagacggtggtagtttagacgatcatacatgcacctatttctctcttatgatatttccccttatactgtccttacttctttcaaccccttatagggagcataagaaaatcacagttcccttatttactttctcgtccacaacacaacatcacccaacacaatatcacccaacacaatatcacacaacgcgatatcatgtctgactcagatgaaaaccaggctacagcgattgaacgcgctgatagtgatgaatcgctgatcttgatgacctcgtctttgcctgctgtcatcagctttgtccaggaaacccccggaaacctcttcgacgcccccaacggcgctgctctgatccgtgggagccccttattagggaccctttatttcaattagagcctcactaacctagtcaattcagatgcgtgcaactgccagggtgtctggggtgcaggaattgcccgtgcatttcgtgatcgggttagtcaatcattcaatcacccacttgacaccatagtgtagagctaacaaggcgatgttttatagtatcctgccgcctatgatatctaccgcaaccattgcctcatttacaaaggccacccagttaccaacatcatcaccgacctacgcgatgaggacccgcagccctctttcgttgtggaccatcccctcggcaccgcgctcatcatcccaccccagcaaagtgatatcctcctacactgccggcgccattggattatctgcctttttacctcccagaaatatggcagccacgtggattcggaggatatgattgtcaataacacttttgctgccctacaagacctgagtgaacagctacaagtgctttcccgacaggctcccgagaccagtagtgagcgacctctgagtctctactctagccgtttctgcactggcttgttccgcgttccctggaaccgcattcttaacttgatcaacacggttggtctgaacatcaacgtataccacccctttgcgttcagcaaccgccgcgctcgccccgtttgtatggagcgtcccagagacagttaccaggactgagataatcaaaggatctgtttcctccccatcagcaaggattttggctggtgggtttctacctggtggtgtgttgtggaggagcgagggttaactcattctcattttatgatgacaattgaagctagctaccatggaccgagcacatgcagataactttgatacacgagaagaacaaaaaaactagctcaaaagaaaaaggagaatcaagcctgtcgccactagcaaagtatgttgtagggcctccccttatcacctgacagcgcgtactgtagatcgcgcccgcccgcgttgaggtgtctctcgatttccccaagctttaccctcaccatatacctacgattcccaccgtattacctatcgcataccttctgtgactctctaggataccaatatgcccggtgaaccaccagctcaaaagcgtccacgcctccccttcaaacctcccagtcgtacgaatagctccgcgccaaagcccaaaggaaaagcgaaacaaaccacaaaagcctccacgtctactaccgtgcccaaaacaacaaaaagcaaatccacaagcattgggaaacgcccccggcccgattctccggcagctaatgccaatgccaacgccgcctccgaatccgaatcagagtacgattccaatggatcgggccgcagtcgttcgcgctcgctctcccaggagcccgactatatccttgctgaaatcacaactgcgaaccaagcagaggacgtgacgtccagcgacccaaaaataccttcgaagctgctcacacgcctactgcatcagaatttccagaatgagaagaccaaggtcgcgaaagatgccaatagcgttgtcgctaagtatattgatgtctttgtgagagaagccattgcccgagctgcttatgagagggccgagtcagatggaaacactgggggcaggggtcttggggacggcttcctcgaggtaagtcttcgttttttaatctcccaattggctaccattggtatgctgattgatattctaggttgaagatctggagaaaatggcgccgcagcttacgatggatttctagcctctgcgtttctactaccaagggtcatggcgttaggcgaaatccatcatcaactagggcgtattatttattgttcaagataccacagcattggcagaatacatgccacatttctaatcaaacatcttcacacgcaagacgctcgcaagagtgaaatatccctcgggttcgtatactcaggtggctttccaacggtgtgatcctcaacaaaaggaggcactgccccgaagccattggcattgtgaaacagtgcaatatctctgttaaccctctttgataaccaggcgtttgccacataggccgtgttctttttgctgagatgaacaacagcaacggggagcttgttctgctcgggtagatggccgagcttggcgtcgtatgctgtgtggcagatgtcgaagacgaagaatacccgcgttcgccacttctgagctgccaccagctttgttgttgggtgaacttcttgtgggatgtagatatggctttctttgaggaggcggacggcttttggcaggagggcctctgggttgttttgggctttggatatctgagaactccggtgcgagactatgaccaggactcggagggggtttccctgggacatggtgagctgaagatgtgaggagtagtccctttgaagggttgcctggatgggtccttaccaagatagacgagacggaatgtttggatcgtctctacgccttttctgtttgtgttcctcccgtgagggtgcactgctacataccaggttttacagggtcctcgagcagagttaaagtaaaaaaaaaaaaaaaaacttcctacatccatgaggcatatggggggcaaagtcggcgtctcacctggactagatgataaccttccaatggcccgacggtggatctggtcgttcaaactagaacatttgccaggggatggtcatctgccactgagtacaaacatgctgacagttaaggaccagggtcttgcttcagctggatatcaacgctgtcgggtacctggtgactgggttgagaggtcgggatgggactcgggtcagtccgacatcaaattatgtacaacgtagcaagcccgaagtacgcatcggagatggtaaaacaaaagtcagagataagacaaaaaggtccattataatttgaacgcaagctggatgtcgccgagaatgttatagttgatagtggacagaaggcggtggctagtggattttcccccgcgcgtgttttgtttcttcaacgcgtcaagcccagcccgagaagaccaatcttttcgcgatggatgatgcaacgacctccttgctcactgagcactttagttacacacccttggtaagcctatcgagactgatacgcatggactcgtgctgcatgcgcgacctacgagttgcgactccggacccaccccttgcaactaggaatatcgctgacagctccctagtctcttatagatgacattatcaactcgatcaacaatctgatttaccaggcgatatctagcttggagtccggcctcctcaatacgccacctgaacggctcggtttctcccatgacagcagtggccccagcatcgcggaaacagacgaggatggcaatgtggtttatcccgaggcgaagctagagatcgagaatggattgcatcagctagagacgctgctggagaccaatgttgataaggccttcgacaaatttgagatctatgtgctgcgtaacattctcacggtgcccggagacttgctctcttgggtgcggttgaagcactacgaggtatgtggaggctttcacagttgtctagacctgaacctgcttgctgttttgtaataagggatatactaatgcgccttgtgctagggtctctctttcgtatcttcgccagacacaccgacgccagaaaccatacatgcgcaacgcaagaagttgttcgagacaaagaaactaaaccggtcgctaaaagaagaacgcgctcgaaatgatgcggtcatatcacagctacaatctatcttgtcgacagttgaaacagcgaaggtagatggtgtgtccaagacagcggaagacataccagtggatctgtccttcttgacctctagcccagctgcacgccagcttcgtgttggtgtcgatgctgggtcgaatgctaaacccacacctcttacaaccaacactactttcattctctcgcagctgcccgcgttgcagacgacacttgaacagctccgaccgaaattggcagccctgcccaatgcaacggtacaaattgaagccaagtctaagagagatgagagaaaggaatatatcgagagcagaattcgactccatctcgagcgagctggtcagcttgctgtgggtgatgatggaaatccagtggtcgcaggtcgcagaatcgacatcagagaggcccacgcccttgaaagcgtggcaaacatgcttacgcaagacaaatctgtgtaagagaatgtgcgtgtgaagaatgttttgttctacgattctattattgaatatgtacaggtcgccttattaagaccaggtgatgctccatgtttcctgggtctttctaaaggggactacgtcagtcttgtctgactggaggatctccaagatcttctcgcccttcttctcgatagtgatgaattccttctgctcctccgggaggccatagaaggaccgtccgaacttgctcatgaaaccctcgacaatttctggcgtgatctcatcctccctgaggactccgttatcgcaggcctgctcaaacgcatcaatcacaacctgagtggtgtatggttgggtgaagactccagcagcgatcttctcgccaccacgcttggatgccgccgggtgcggggcgctgtcggagccaaagaaaaacttgggatttcctgagacagcagcacggagaagggcatcgcggtcggctggggtcttagcaacgggcttgcagaagcagaatgggtcaccggcccacgagtcgatgataatggataggtgatgggctgtgatggtaccagaaacggtgggaccgcacatcttcacggcctccacagctgcagcagtggtacagtgctccaaaacgatgcgcagtttagggaacttggagtgcagctcaaagagcttggggaggaaacgctcttccgcggacaagaccgtcacatcgcctccggaggggctttctccgtgcaggttcagaatcatgttttgtcgctccatctcctcgaaaacaggatagaattgcgtgtagtcgaccacgcccgcagaggaattggttgtcacacctgccgggtaactcttgacaccgacgatgccgcgcttcttagcttcaacgatagtctccgaggtcacggtctcgtggaggtacaacgacataaggaagttaacattcggctcgatggcttggaggcgcttctggtagtccagagcacggtcgacggtcgtgataggtggcacaaggttgggctatcgagtgtattagatataactcaaaagctaggatttgtttcccaataaagaaacccccttaccataacaaaaacggtgttcacacctccctgtcggatagtaggagtcaccaactccatcattggaccatcacgaagatggactatctttggtcagcttgcatctattaatgcccagaatttcttagtaccatggaagtcggccgaggcggggagctttactccctgcagcttggagagagacatgataaattccaatcaagatcaagctcaagctccaatggcaaaggttatatccctgatatgttcaagaaaaagtcgatctgcgcttttgccccgccatttctgaaaaaattctgccgatggcggtggccctatttggccattctccagattcttggattcttggattcttgtttctttatttcttgatttctcagctgattctaagcttgaaaatacaccgaagagtcagaggcaatgtgtgaccataacatgccgaactaatttgaaagaatattccagtcttacctgcgcatcctctccgcacggactactcaccgtggcacgtccggagtgtactcaggaagaaacagggaaacattgatattcaaagaccaaggcctagatccgttcaaggaatacgagaattcctcgaatcaacaaggcaagggtgtgttcctgaatcaccgttgccgctggtggcccccaggcacaattctcggcgcttcgccgtcacctatcacaggccacgatgaccatccttgggagaaattagattttccaaaagacaaatgagatcggttcttcaactaaaaatcacaagaaaaccccgctcagactctatatttaggtctactaggcgctttgttggttgcttgtcccccgatgtgtctgccaagtcgccgagtctgcaccctggcgctcaggcaattatactccggggatgtacaggtccagttgcaaggccaatgtttaaaattctagacagtcctgcaaattcaacctagagcctaaggcgaatcagcgcggtctattaccatcgaggcgccctacatggcgctatgcagtaatcgggctgaagatctttgggataagccctcattcggtggttactctcttgtgacagcaatagcgctcgctaagatagtccctggatcaagtttaggctattttccacgaatatacatatcccgcctggtatccgtcaataatctgagtcctgattgattgtatccgaaaagggtgtatgctgggaaaacaaccaaaggaatccgagcaggagacaacgcctctccccggagatttcagaaccaccaagtcatctcgagcagtatcctggggatggaatagggctgggaaactcggactgatgccctttatccggcactaatcaactggtcgggccatatccgcattatgacccacctaaatgggcctgatggaccgttgagtcaggagccgtcatatagttcaaagcgtccaatgcattgccactccagtttggctcgtcaaaagtgtcggtcaaatcacagatcggaacgtcatcgttcaccacatgagcggtttccgctaagccttgcgcaactggtagtgaggaaagtaatgtttgcaaagcttcaatggcctgaagcctccccgggcttgagttgctcgagaacactccattgtcaagatggagattcctttcgaaatcatgcccatgctagtatcaagcactggggacccatctggcttgaacgtgcgatatttgggttgagaatatatgcaaatctggatgaccagcatggatgtaagttcattatgcacggggggcctacctgtcgaacaataggccaaataagttctcttgaggaaatctggactctgtccatgaatttggcgtgtggcattggcaacatattcatcgatgctcaagatcataagcaatgtcaatgtacaacatactcagtagcggagtaatcaatggcaccgtgaccacttggatcatcttcatcaatcccgtatatctgtgatgagttggtttcgcacacgggacagaatgctgcccatttctggatacccacagcaattgtgccctaagcgacacagcatcagcttccagataataccattctagagggctaagcgttctggttcgtcagggttgtgggcgatcagcgggtttaatctcgcggggttgaatcaacagtcggagatccgaaggagtaacccggtcgatgcaacctcagaagacgtttcgtcaggcttcttcagacgaaaaccgtcggagtctgctttagcgctctaatgcgtggtgcatttctgtctagtcattggagaaaagggagaaaagcccacaattcgacttgccccgctcggtgatcgtcgcctacttcgactagcactactgtgcttcatattattttcaccgtgatgataggtgtagcggcgacatccgagaacaaatcagcgtcttcttatcggtacatgtgctaaattgactatgtgcctgacgatgtttatgccaagtatggtccctggactgaagcataaaaaccgtccgatgaccctcctacatctcttcagtcagctcagcaattcactctcaattcaatcttgacaaaatgttccaatctcaatccgcaaagggcatgttcgccctagcagctatgagcctgatcagcggcacaaccgccagcctcgaaacctgtgccagcagcaccgccttcagctgcgcgagctcctccacatcgccaacatgctgcttcaactacccaggcggtgccctcctccagactcaattctgggatactagcccatcaaccggtccctccaactcatggaccatccacggactgtggtacgtagataccgttatgaatacctgaaatcataaactaacccctccccatccaggcctgacaactgtgacggcacataccaggccagctgcgactccaaacgtgcttatacaaacatcacagcgatcctgcaagaccaggatctcggtgacctggtcgactacatggacgactactgggttgatatcaacggggccaacgaggacttttggtcgcatgagtggagcaagcacggtacttgcatcaatacaattgaaccgagctgctactccggctacaaggcgcaggaagaagtgggtgatttcttccagagaacggtcgatctgttcaagaccttggatacgtacaaggtatgtcccctctctgcctttcattatatatgctgttcgtttctgactgtgtgccaggctctctctgctgctggcattaccccgagtacatccaagacctacactctcagcgccatccagaaggctcttactaccctgcatggtgcgtcggtttaccttggctgctccagtggcaagttgaacgaggtttggtatttctataatgtcaagggcaatgctattgacggaacatacaaggctgtcgatacgcgtaagttttatcatttgcttcttggttggtgctttactgacgtcttggtcattctagtcactacttctagctgcccaacgactggcatcaagtatgtgcccaagtaattaaggaacagggcttgatgtgttctgttggtgattgtccttgctgagttgcacactgaaagtgttgctaaatggtatctctggattattgctatacatgttgatatagattcgaattctcgttagtctcatatgatgatcgttttgcttgacgataaagtctcactgggtatagatgtagaccggtgcttatacggcattgaccacgtggtcacactcaggcgcgaagctttgaggcaagaatgtcgtaaatgcatcctggccctgtagtggacataaagcacaccgtagtattgggaatcggcgaggtggcgggaggtcgagaggtcgccctttcaatcggagtcgagtgagccattgctcaaagtagaggtacccgccgagttttatcatcgcaacgaaacatagcttgcacaagtcttgcagagatttctgcaataacacaactatgtatgaagccatacacttgttgcagcacgcgacaggaggaagagtgtgtttgaagccagaaggggtttgggcagagagcgcacgagtggtgttttcatatacccttgagccgtgcagcccgccgttcgtcttccctcttgtcttccacgcgacccaagaaatccatgcgaccaatataaccttccttagctttgctatgtgtgcgcagctcgtctttgataccggccgagtcgacgtacgaggcccagtcgagtcttgacttctccacggtgttgatcttgggtccgcgcgcatctttgtcatcggtaacgagttgcttttcccagcttttcttaatcgtgccggtcggattggggtcaaatcgcgatatcttgcgaagcggtcgccgaaggttacgagcggcatttgcggctgcagcatcctcgtcggtatattcgacattctccccactggacaaaaacgctttagcctccgccgagtgtttgggcacgactttctcctcggtgatccattcgccggcaaatttgtaggtgcgcttgatcttgatcatctggtcggcgtgcacggtatggcctattttgtgctccgcatcttcggcaccctggtcctgtcctttggtttcgcctgttggttcaggttcttggtcggattcggatatctgctgggtctggggtggctgcaagccggtgtgggtctggggggcattcatctgctcccatagagcgtccacgtccacggtcgcgccgtcgatcctggccagcggtttgcgctgttcctcctgtctgctcgtagaacgcgtattagaacccaatattaagtcaagcagcattgataataacttaggacttacatgtgttgtttcattgcgcgtgtccgcacgaatcccccggttcctccttcattgtcgtccaagtcaatgtcgccatcgtcttcgtcgctatcgcgcgcgtgttttcccttggccttcttccccttggccttcttatctttcttctcccttgcttttctaattgtagcctcatctccagagtcgagttctgcatccttggggatctgagattgggtgtctgtctttcgcttcttctttactggttctgcggcttcatcggggtcggaagataagtcggagtcgtccggtgccgcgtctaagtggaagtcttcatcctcggcggagtcatagtcctcctcatcaagatccagattttctggcaaagtagcatttgccattgtcaatcttttctgcttgactgggcttatcgagaggtgatccagatctttaggacaaggcgcaacaaggtagaaggatgaatttctgccgtaggcggtgtcgcagctatgtatgtcatctccgttgactccattgacaataagtatgtacatcttctatgcacatccatgaacatctagacagacctctagctttcagaggcacctgtcaccatcatttatttttacaaccaaagctctatagcagtcgggaaaagcataagcccctccacagtaatggcagtcccaatgtcgaaacattgaatgcatacaggcctacacatgtggatgtataaatgagttaaaagacttggtaattgattcaatggttcatgatcagtagaagagataacaattcacgttctgatagaagaacagcgaagaagaaaagcctccccaaaacggactgcaagagtgcaaggaacagaccgtccgacgggctattcctcttgggccaaagccagaaacagattcatcttgtcatccagattcagccgcaaagggccatcgtactgagatcgcacggatttaaggtgcattggggtctataatacatatgatggttagtattatcctagtatcgtgatcggaaggcatgatgagaaagtaggaatggagggatggccatcaataaacaactgttcttaccttcgatctcctccagaccagtctggggtgcggcccaccaattggattcagcattaacaacaggctcggggaccacttcacgggccacgaggttctgctggttggcatcgcccgctgcagtgccgtggacagcgtgaccacggtgaacaccacggtgagcagcacggttagcagcacggtaagtaccacggtgagcaccacggtgagcaacacggtaggtatcacggtaggtatcacggtaagtaccacggctacggccacggccactgccaccacgatcataacggctgcctcgcacacggagagggccaccttggcctcgaacccgggccaactgttctccacgggccgcctgatctccattggcggcgccatggagggcaccgaactcatgctgtataggtcatgcacgtcagccatcatgcactgctaccatcccaaagaagaattgtgtgtatgagaaatgggggaatggggtgaatcttacaaccatctgggcttgaactgccagcagggtgagctcggtaacacgggcgtcacgagcagccgagggccgcataccttcctgctataagtgatattagctcagaacctcgaagctcgggctgaatggcaattggggtcatatcgtacatcaacttggcgttgaatggcctgcgacattagctccatgatgcggttggcaaggaaagtaggggcagtgggagcaataggctatgaataatctcagtattgctctacaaaggttccagtagtcaatggagcgttcaatcggcttacattgcgccgggagcgccagtcatcctgccgacggcgctgggcggtgctgccgccagggccggcagggccggtaggagggacagcctgctccttcattgtcacacaaagacagcagagacaaaggaataaagaaagagatgagtctgctcgctgtgtttattcacagcggatgaaaaggtgtgttgtgaagagaaagggaagttcagcgtttacgtttacgtggagctggacgtggacggagttttcacgacaatacgtgctcatatttacgttttatgaccaagatattgctcggcgtctttgctcggcgtcttttttgattgaaacctggagctcccctctagcttgcggctaatgaatgacttactagtttcctgccagacaaaatccctaatcggcatgatggacaacaaagagtgttgaatcggtgccttctgactctatctagggttagttgattccggctttgaacacatactctctatggctaggtatattctggccaaaagcattgagggatgttggtggcgaagccgtcgggagaaagaccatgctttgatttcctatggaagataaaggtctatctgaccagaagaaagacctagaagcaaataagaaaggcagccatgcctctagcagcagctattgtcactaatagctagagtatacaacgagaacaaggattgtgaagtctctttggtgatggatggggtttgaaagatggcaagtatgaggactcctggctttttatcttcctctatgagcatactgcttgtggatatgatgacctcggcaactctgctagtatgcatggagtatggatggatatatggtggagtcggcctataagcagccgcgttgcttgtagtaatggtaactgcacatttccgttgatttcatataatcaattatatatgtacttaacgaagatagaccaagcactcctatggccttcaaggcgaaatgagacatggctgggttgttgtacgtacgacgactcgggcttttttagtctgaggtcattatgttgatctagcttcagcaggtacgatttatatcgaccttgtgatataaaaaggcgcgaagtagttggatttctattatctttctgctatggtagactacatacagggatgtctttgacagatatcatggcgtatcttctaagtatagaaacggagaagatatcgacgagggatatttggggaacttatttgcataatgtgattgtactgaacatttaaaggttcctaatgcggctctggccattcatcattggccaacgcaagcagaggattcgactcgggaatgtaacccagatctctggaatgcgacatccgaggaagttatgatgccggggaagaacatcatattatcacctcccatggtacctcgcaaacttttctggatcagaaaaccgctttaggcgaaattgtcctcttctggttcgatcttttatcttcaaccaaacttgttgtctagatgttataccaatccggcacacgcaaagagccaacctttctggcttgacttagtcactgttcctctttaatcttcgtagctttcttgatcataattgcgcagaaaatatggtgcctggttaagaatgtgggccctggtatacttttccacgtgcgagctttgtacaggctcgtgtcagcgtgccgggaatagacacggccttgagagagcatttaatggttccattgccttgaagatggatgtaacgttcaaaatcctggtttccacgcgcccaatataaggtcttaagtgaatctgcttgaacttgaacttgaaatttaagtttcaacctctgatctatacctaccagggtgcatattattcaatataaatttgttcaatatcccaatgcattcttttactactcatctctcccttctatttgctgcatcggctacccttatcgccgctcaagatgccacatcccaaagcacaagcggcaactcgaactgtgcttctcaaaagtaagctcataagcctatgaaattctgttgagattcctttctcataatcaacagagttgtagattcatgcgttgcgataatgaaacgtggactcgcaaagtgtgcctcgaatgattgggactgcaagtgctcgggggctgcaaacattgccaagtaagtaggccacctacttgactctcgtaattcctcaatgagatgtctatacactcaacaccgcagtactgatataatcgagcagctgttacgtagattgctccgatgatgacccggattcgttcgcggccaaacaactgagtgtaaatgattgcgctaccgcaaatgcatacgaccaaggagagactaccgtcgcaccctcgtggactcttcctggatcaaatgcggcacagccaaccgacacagatgctactttgaccactagtagcagctcgtctactactgccggaccgactaaaacctttgcgaatgagaagtcgacgagtccatcagagggagctgcggttgtgaatgatgctggtagttggatggctcttgtggttctagggctaggggctgcattttgagactggggtgtcagaaggaagtgattaccgagtttacgtgattattagacctaattagatatacttgtaggattgcattgacattggaatattcattctgcgatataaataatggagatggcatatgtggagcaaacaacctccttgagacttagactagatacatattcgccctacaccttggttgcaagactaacccttctcacaaaataacagaagccacagaagtaccagaccagtgaattctcacctttcattaatcaatgcccagcatagataaccatgagtacatcccttcctttcaacagagtaaccattataaatcaacgaagcaatgtcacgcttacacagcgcttatatcctcccggagtcattctctcatcaattgcgatacacctgcttagtagcaatctccaacttctcgagttggaactgctctgcccgatgacgagagatatcccgttggaaccacgtaccaacagcagcaacgaggcccatcagcacctccattccaacaagtacgcacagcagcacaaagccagcacgagtattgatacagtcacgatcgaagtggcggggtgtattaatgctgctcgtcccgtttttccacttgcaggtccagctgtggagggtttccttcttgttgaaccctgctgggtaatcggaggacggcgggtatattatgaacagtatgccggccagggcagttacaaaacctgcaacggctgaagctgaggcatagttgttaagtgacttgataccagaatgcggctggatgagagttagtatatggaatcaaacacagtgcagtggaagggtgtaaaactcacagatggtaggagggtaagggcgatgtacaccaagttcaagatggtgattatacagccacatgaaatggcggcggttgttggacgaagatcaaagttcaaaggccacagtgcgaggccggcactcgcccactgggaggtgttcttataatgtcgcaagggtggggcttcgcacgcgacgacggcaatagcaacgccgaagattgaaaaggatagaccaagtcgtgcaaagtaaaggacacgattgcgtttgaggaattttgattcctccatgtatgaagaatgagcaccgcctgatccgtctagggacgagtttgagatcatgatgagagtgtcgttgggtttcgtgagatgataaagaggggtcgaaggagaggaagtgtgtgtaactgtcaatgattaccttgctggcaaggatccttctggtaattgatatgaaagaacgaagaaaccctcgggacaatgatggaaaagtggaaaaagcaaaggtaggtactattttcaaacaactgtctcggaagcctcgtttcactatcggactgggccaaacacttctgttgtggtggtcacgtgtcgatcacatgctaatgcctgggctatcaggcttcacatggctaattaactagctagatctcgatcattatagataatctaaccttcttcatctctctctcgctccaagaactttctagccatcgataccgtcaacactgaaggtgccgaggctatacacgtgacgctgtttacttagtactgcagtggggtttccgaccagagcaggatgaccaatcggtcatgtgatcactaaaagcactctcggcaacgcagacacccagcgacgactctgctctcacacctgtttcgcaggcagggctgtcggagctcctgtcccccgtggcagggtcccctcttcagtatatatatttatgatcaaggaacccgctgaccgggtctacttattcggttcccggaataacatggaccctggggatgtcccgacgtttctcccagagctaacccaggtcgaggaaatgctggtatctagggtacataccattattgaagtcagacaggtacgtggccagcaatacttttatcgcggccacgtggctcatttcctgaccaatgtacccgtttcctaaagatctttttctccgtctttcgctgcccagatcgcaagaaaaatggcggaggcgtttccaagtccgcgtaagcgacgccgcctcctccaggagtcggaggttaatgaaggggatatggaaattgaacactacgtccatcgaactgatccatttcgaagcattagcttcccgaatcccgatccgacagcccttaacgtcaccaccatgaccgctgaggaagatcctacacaacatttgcaccgtggcatcttcaacaccctcgaccagtatggtctgccagcgaagtcactttttcatatgttgaatgcaactatccccggtgccagctttcctctgcttcgcgttgttgttgcgagtgatcattcggctctagtacccctggggtccatcaaagacaatcttactacccttctcgacaaccatagccttccacagatttaggtggaggtgatcaacggggaccacttttatatccctactttgttcccgatccactcaacagccgagctttccattgcgtttcaccatcttaaggatgagatcgtccggcttctcgacgagactcttggaaccaaatggcaactggtttgtccattcaacattggcagggattcccgttccgcgcggccagcccttggtgttggtgttctaccctcaacaaatgcaaactggtatcagcttcaagcccacctgacgcatcgacttacatcacacatccgtcctatttttacagacatcgagttcctccctgggaaactcagcctccttggggagggtgatcctgtctcatttaaagatcgcgtcaaaggtcctaaggatattcagatgggatgttcaatcggcgttcgaggaggtaataacgctagtaccttaggaggctttgtcgcggttacatatgacggcgaaacgcaccgtggcctcctgaccaactaccttgttatgcgcccctcccccccatatgctaaccttgatacaatcaatcgtgagggcgtatctcctctctcgcctatccccttccagggggcaatcagtatagaatctctagccaggatagaccgtgactataccctgaccgatcttgacgaccaactacaagccctggagacacagaaggctcgggtcgtagacttcatccggcaacggcagctcactagcgatgcacctcgcgcatcctcccaacaacagcttgaagccgttgaaacctgggagaaaactctgattgcaacgcgcccagtcatccaggcgatgccacacgtcctaggtgacgtccattctgcgtcgggcctcttagtccatggccgacgtgttattgattgggctttcgtcgagctaaccccggaggccgaggagcgcttctttaggcccaaccgaatgcccgaagtcccaaggaaccagatgcctcgaagcggcccctccggtccacctccggctctagtcgcagcaggcacccgtctcgacgaatttagctcgttacaggaagacacgtactatatcaaacaagggcgcaccaccgacgtcacaggtgtagtgtgcaacggtgtgctgtctgtttgcaaatgggcgacacgatacgatatcaatggtaataccgtcgacagcaaagatcttcgtacggaggaattcatgataataggtatccaagatcgctttattgagtttggtgactctggctcatttgtcgtggattcgaccggggccgttgcgggcctcgtattcgccgaattcaaacacaacctccaggctgtcggactcgcattaacagtcccggatcttatggacacgatggagggtcgacttaaaggtcccgtctctctccgtctcccataatttccttgcttccatctgttttcattgccggaaacgtatttacgcaagagtagatcgcttcaacatcggctatgatctacgaatctcaacagagatagtgactggttcttcggaaccatggatgtttttttccaaccgacaatgatattattcttaatctgtctgtctttatgtggtttgaagcggtctgcctatggtcgtccttcgtggatcacagcgtgattctagtctatctgctcatcttcctatcctccgagtttgctgcctcctgattgtcttcgcgacggattatactggctacgcatgcctcttttatgagaatattctgctttgcttcatttgctaatggaaattgctctaaattcattgcgacctaataatcttgaaaatcgagtaaatatccccgaatgcatgtatgcacacgatcgctgtccccccgccgtagtagtaaatatggtgtattatgcatatgtagagctaggttctatcgcgcgtaatcatcacgcaactatatagacgcagactaagaaaaagatagaagcaatagcgttacagctagtctcaagttcctttggacattgatttcttgccgtggcgacgggctacttgcatattaagatactgctggcacagcgctacagccgtattaggcaagggctctcttagcacttgattttcaatacgaatgccattttctatggtaatcggaaggggatacagctaggttcagaattgactatgttggtttagtgctcttcatccgtgtccgtttccgtgtctgtggagatacaacctcgaactcagcaagtccgatcgatccctcagagcaggaagcaaatcttaatggtacaccatgttggcatcggaagatctagcgacattcatggcgatatctgaaatagcccgagcacactgatcaacaggcaatcaactcagccgctcattaagttcctgcaatgcgcccgttgtcaatgcacttcgaaacgtaagtgcaacagcctcagcctcattccattgcgcgctaaccatatcgccaccaagctggccgattctcagaactcgggcttgcatgcccggacagtttctttcacaatggttaacattggacaaacagggcaccagtacctaggtattttcaagttacttgcagagacatgattttactcccaatactcggttgaattatgaaaagaaaggtatcgagcctactctaagaagtggttcatctctcactacagcctcacgatgtccgaataaacgaggcaacgtagaattgtagtagaatcataatccaccatgtcgattttgaccatagcggagcatttcactgtcttggcttcttcaatctcttacttttatctcacttgttgacaactcttactatttgacttctctcaattcttaataacgtttacttcttaactcatcttacttcttgaaaactctcacttgttgagggtatcttcgcggcgcctactccaaacgcttttagggttcccagctgcagaagttttgtttttttctttctgtagaataggaagctatagacgtagttacgacgtagttggtacagattaagcaggcacgatgttgcgtagaggggtatatcgtgtttcccccagcagcgtaaacttgtattcacaacatcgcagccatggcaagcaatatcaccaacatcattgttaatgtgttcccggacccccgtccacccacctccgcccaatcctccccatctccctctgcctccgggaccaatcggtccatgggccagcagttggtggcttcaccgggcttttgggcccttatgattgttgtcgccggatgccttgctggcgctggctattttttttggaggaggccagcctccaagagcgtggacattgagggtaccccgtaagtggtaaaccatgattctcatggaaactatattggcgggtctttgcctatgtatgcacagaggctaatatatcgtaaaatagcctcaaagacatcagtgtgggcgagcagcccaagcagaccagcgaagaaatccacacagtggatgatgtcgaggcccatccgcctcttgtgacccccaagactcccaagacccccgcgccccccaagaccctcaagactcccgaggcccccgcgccccccaccacacccaagaagaagatcccgagctacgcagaagtggccagcgccactacgacgacgcgcaatgtagcacacgggatagagaaggggctgtcaatctcggtatgctgaggcgatgccgaggcgacggcgttcctctgttgttttatccttttcttctctccgagaacctcagtgaggtgagatgaatgaaaacggagctttttatcaaaccgggggtggaggaggaggtgttttggcggcgttcctctgttgttttatccttttcttctctccgagaacctcagtgaggtgagatgaatgaaaacggagctttttatcaaaccgggggtggaggaggaggtgttttggcggcgttcctctgttgttttatccttttcttctctccgagaacctcagtgaggtgagatgaatgaaaacggagctttttatcaaaccgggggtggaggaggaggtgttttggcggcgttcctctgttgttttatccttttcttctctccgagaacctcagtgaggtgagatgaatgaaaacggagctttttatcaaaccgggggtggaggaggaggtgttttggcggcgttcctctgttgttttatccttttcttctctccgagaacctcagtgaggtgagatgaatgaaaacggagctttttatcaaaccgggggtggaggaggaggtgttttggcggcgttcctctgttgttttatccttttcttctctccgagaacctcagtgaggtgagatgaatgaaaacggagctttttatcaaaccgggggtggaggaggaggtgttttggcggcgttcctctgttgttttatccttttcttctctccgagaacctcagtgaggtgagatgaatgaaaacggagctttttatcaaaccgggggtggaggaggaggtgttttggcggcgttcctctgttgttttatccttttcttctctccgagaacctcagtgaggtgagatgaatgaaaacggagcttttttatcaaaccggggggggaggaggaagtgttcttggtggcgttcctctgggctttttggccgtttttgcttctctccgaggacctcagtgaggtgagatgaaggaagaaaacgagacttttgtctctactttttgttgttttgttgtttctgttttctgttgcttttatttttatttttctttggctggtcctcttcggaggtgaccatgtctaaatacatactgccgccgggtagtttcatcttgggaatgcattttgctgttcaatgtagaccccttcgcagacctggatcttatggtagaccctgattgatctaacacgagactttgaagaggccaggtgctaaaatttcctttatataaaagttttctcttagatgtctcctagatgtctcttacctttggctcccattatttaacaatcatctttttcttaaactgtaacgtccataatagttcagaacttttagggaaatatttccgctatagaatctaaggacaatcactagaagtaacatattgaatgaattaactacatcttgctatagaaacccaagcatctaggtagtaaaatttcgagaatatagggcactagtccctgatttatatatagcttcatacacggggtgagagaagtgttttcaactggacagcattaggagtttcattgagcaaatccattcatattgataattcacgacgctttaatacaagataaacagcaattttcagtaatctcatccaatgacgatcacttctagtgagacccaatttctcctgacccttaaagtcgagctaaatatttccaaaatttcttcccaaaactccgaggcgattttgcgatagcaccatcactcgctttccgaacactagccgccatatcataggatggagggctttggccaagtttgtcattcatattattcacctttgaggactcaagtaaccgtccagaagagcaaaagtagtcaccgcgatcctgagagttttgggctagctctcttcgcatctggctgttgggattctgctttaaagaagcataagctcggttgaactcactgtcggagagtctttccatagcgatatagatttcggggtttcctatgcgttcttttagaacatttgataactttataaccaactgcatctcctctttcaataacagaaagaacttttcaaggtagtctatcattggcggggtaccgtcgtcgtgcgtagggtgattctctgctaacttttcgagctctgtctctagttttataaactgttgcagtagtaaccggcgagtacgctcgttctcgatgacagaggtgagtgcatctgggctcggctcgcataagtggtattgtggagaagggtgatagtcggagactagcttcaattcttggcttccaagtagttcggacattttagagataatgaaacgattctcgtgtggtaaactttggtataagatagagaaggaatattgaatataatttgggatcgaggtttgaaatagtagaaagatatatctacctgggcatccttgatacgtatactccttgccgccgcctaataaggaatggatctctacctaaggtagcttccctcccaaaccttgggactaatccgagcccctctcacctttagcaattaatccttgatcatgctcaaccagggcgtgatcggtaaacttattttgcgcgtttaccagacaaaattggcattgggtccaaacctagcgacgccgaattatatcgttttggaatcggagcttgtaatcaatacgtcacgaagtcacaattcttaatcacagacagtagccctggagtcttttcgctctcaatattacaagaaatccatagaccagattgactctcccgatctactcatttttacatcgcgtatgtatccaaatcagtctcctgcttcacgctcagcatcatctttcgccttggaggctcgaagatgtcgcaatgtggaaagatgctcctcgggctgcttcatattttttggaagaaagcgccaaaatactccacgatactttgtttgaatgagcgcatcttacagaagatctaccgacacctctcactagtcgatcaagtttgtctatctctcagctgcaaagagctcttcgccctattcgggacgattgtgaagcacaacgatcttgaatttccacgactcttgcttattagaaatccaatactgtgcgtgaacagtcaggatgtgctgcgaaatcaactccttcttcgactcgaaaatcgccgctgggcctactgtgcaaagtgcttgaaacttcatccacggaaagaatttgcaaaatatctcctgagacaatcagccctggagagatcctgcgtatactatgctggtatagttgacctatgtccctgagcccaaagtcaagatcctcaaatcaagcacaacgccagccgaaaccaaatatggcccattcgagtatgactatgacaatggagaaacccctagcctcggccacgtctgtatgtttagcagatctggctacgatgtgcgagttgctctggttttatatattaataaaactggcaagttatgtgtagcggctcggcatactataagcttctcctcctccgcccatctcacagctgagccgacctttgcttgttctcatcaggatctcctatctctcgtcccagggaaacttactgcaaaagatcctcacacgtaccacattttggctacttcaagacctcatcagtatctcatgtctcttgtccccggggagctggtcccaaaagtctgtcccatttgtcagactttgattacaaaatacgatttgcctgaggatatgatgaatcaggctgttttctgggtggttcgagatttgggaagctgtgaatggcctgcagaccgaccttggtttgaccagtgtcgtctcgccggagcacggttttcacttaatgagatatactggtgagtttatcaaaggatctgtggagaaagaagagctagtactgattcccatataggtatcggtcgcagaacttgaatgactccagggccatgtgataactataaaagtaccccagaggcaggcttagacagcttcccacttctcttctcagtagtcaccccatggtattctaatgacgatctaactacgttgtatctgtaaagaggaaaacaactagtgtagattcggctaagatctgatggacaagagggagagagagagaggaagagggagcggaactatctagtgatctggacccacatgggtgaccgccttccggtcacccaacatattctcctctctagcaccctctcagtaacaactctgctctcacacctgttttgcaagcagggctatcggtgcccctgtccccgttacagggacccctcttcaatagctagacatcaaatgccaaggttgtacggagtacccgtggaatgcatgccacaaggaccgtgcatatatgcacgccataccaaacatagcttagcgtgtaaccttgatgatctataagtgctcgacgacctgcatcttcaatcgacagcatggtgcatttatatgagacatagctggacagaatcagagatgggatacaatggaagcgtctgggtcgatgcgtgagagtcgcaatgatattatccagtggcttaagcatgcagagtgtacactgttgcaccatctcttaacgactctagagactctctaggaccacactactgcctcaataatcatcagaagtaggttgagcctccagggtagtcacatgacttgtatgttattgctattgctattgctttttctttccttacttacctacattcatttatcctttagaggactcaaccacatcagaacacaatcacttcgacatgcctggtaactatatttatcatccaccacatgacttgtatgttctcaatgtctcttttgttctcgatgtcttttttcttttctgttgctttcatatacttacacttacacttcagacaaccctaccacatttgccctccgtcttccactttatgaggtctattctcgtctaatttcaatgatctgatttcatgtgctctcatcatactctacaaattggatgaaatgaggctgactggaccaagcatgtggtatcaaccatatccactcgaccacgtccagccttgccgtgacgagttatggttccaggacagcaaacacaaaacacaaaacataacaaaaaaacaaaaaaaaaaagaaaaagaaaaaaaacatccaagcactttcaagcatcaacttcaaacaatcatccacttcaatcaaccttcaaataatcatcccattcaagcatcaaccgtcaaccgaccatccacttcaaccatctacttcaatcaatattcaaccaaccacttcaaccacttcaactacttcaaccacttcaaccacttcaactacttcaactacttcaactacttcaactacttcaactacttcaaccacttcaactacttcaaccacttcaaccacttcaaccacttcaaccacttcaactacttcaactacttcaactacttcaactacttcaaccacttcaactacttcaaccacttcaaccacttcaaccacttcaactacttcaactacttcaactacttcaactacttcaactacttcaaccacttcaactacttcaaccacttcaaccacttcaaccacttcaactacttcaactacttcaactacttcaactacttcaactacttcaaccacttcaactacttcaaccacttcaaccacttcaaccacttcaactacttcaactacttcaactacttcaactacttcaactacttcaaccacttcaactacttcaaccacttcaaccacttcaaccacttcaactacttcaactacttcaactacttcaactacttcaactacttcaaccacttcaactacttcaaccacttcaaccacttcaaccacttcaactacttcaactacttcaactacttcaactacttcaactacttcaaccacttcaactacttcaaccacttcaaccacttcaaccacttcaactacttcaactacttcaactacttcaactacttcaactacttcaaccacttcaaccacttcaaccacttcaaccacttcaaccacttctaccacttctactacttcaaccacttctactacttcaaccacttctactacttcaaccacttcaaccacttctaccacttcaactacttcaaccacttcaaccacttctaccacttcaaccacttcaaccacttctactacttctaccacttcaaccacttcaaccacttcaaccacttcaaccacttctattacttctaccacttctatgtgtataccttcgactcgccgaggaagttgcaccttcctcgaacataagcgaggagcactctttgcatagtttgcagagaaggggacgcacaaaaccagaaggaagagcacagatggttttccttttctcttctctcttcgtacttggtatttgttcgaaaatgcactcatttctctgaattgatctggcaggtaacaatggggaggccctatatattcatgattactgattaacaataggtttttaaacctgcacaacccttcgatcccccctccagccctcgagtgctccggggtaattgttgtgacagagacacgccccgtacctgtccagtcgtctcctctccgccgtcgaggggccattagatagccaaaaccacctgtcagagaagatcatccggtaggattgcaactgcaaggagcgtcgagatgacagatttgcctacgcaagtttaacagagcaagggggtgtataattgtaagtgaagagtacttgtcatggaaaagggctaatatagtatcttggcagattttgaagagagatgccagagccagtgcatcgaccaggtgtttttactgtttttacttttttttagcttctgtggtattctttctcatattatatacatgtttgtctgcggagaattggccagcttgagtaccttcgcccgtaataccacacacgggatgaaggagggtatgaaagagggcttggaaattcagctgccggctgggatggttggctgaggtgatgccgaggcgacggcgttcctctgttgttttatctttgatcacattttgctggtctctcttattatgcagaaaaagaaaagaaaaagaaccttagtatgcaatcatgcattccgaagtgcctcacttttgatagatacgtcatttgtatgccactcaaatttctattagaaagttgcgcttttaattttaatatacccgtcatcctgacaatttctcagcggtcagtcagtcggttccttctttgaacgcggcaaacttatgaaaccatgatattcctggaatttgtggaatttatggactcagcagctcattttatattctacatcaccctctaatcccgaagccctctaatagactcaacagccttgagtgaaacggtatttgaagatgagctgttacatatcgggggacgaaactgatgaagagattgatttagaagaatctggagagatatgtcttctttaaagataccgatacaatactttcgaaaacggactaccaagaaaatggcctatcgatctaaaggggatattggagacagagattgcacttcgggagaattctcaacgcgagatagccttgaaagagaaaatgaaggaacttgctaaggaaagtatcaatgtgactgttgttcaagacttacgggaggaattgtctatactttcgaagaaatattggaccttggaacgacgttggtggaagattaagtcttcgattaatgacagcccgctgaccagaggtatcgattactggcgttcacagccgaaatggtacatgcatcgagtactttaggaagattgcgttgggagaagaggatgttgctgtagagactgtggatgctgttctaatcgccagttagaacagaaatttgcagttggtcattgcaccgtggagtgttcttgttgtgagaaatcccgggggtttgcactcgacccagagcaaaaatcccaaattcaagatttcttcaagtttgaaatcaacggcacaggtttctggtattacgatagaatcaaactcgcttctctgctagggttgatggtcggcaattacgaaaaccctttggatctcatcgttcgcttgccgccaagatatacacctccctctgaggaatcacgaaggagctttgtgtcgctgtcatcacttgttagcttacggtctatggatatttccgaatgaagcacaaagcaatggagaaagataatggagagagtggatcgaaaaatgtgtcatcattgctctacctagctagctttatagctacccaatccgattcgacacttcctggctgctgtaggtgctccaatactccacatagcgcttggtaaaacgatacaagtccgctcgattttaaaggaaaagaggacatggatcgaaggtttgatcgcatctaagcacaactatattgtgatcaaatctcaaggaaatgaaaattactagcgcggtaatctgatatgacgggtaacggagatcaggtggagttccgcgtggactcaaaaggttctgggctctggcgggggaaaatacagcgtattttaccaaacacggtcatatcccagtctagttagccgacatatatgattagtcagaacggctgtaactcagcaccctaccgcatctataatcttcatcgctcactcctagaatcatggactggaataaccacactgaacataccgatagccactacagtcccgatgcggcggatacggagttccgctgcggtctctgcaacaaggcatacagtcgccgtacgttgatctatgtgcatgggatcgatctgtcgtttgacgcatctgataggagatctccgagaccggcatcggcgtcggtgtgccaaaactttcggcaagcaacgcgcatctaagcgcaagtcttgtgaaacttgcgcccaaaagaagttgcgctgttcattgactcgtccagcctgtagtcgatgtgttcagatgggcaccgcttgtcactatcctaacaggtcctcggcgtctctaatccagagagatcaagatacaggcccggagaatgtgtcgtatctggaaccaactctaggaccgacatccacgggtttaacccccgatgtccctgtttcagccatgattttgcccgaggatgccagtaatagcgctcccattatcgatgacttcgcctggagcccaacactcaataatatcaattttaccgttgatgaaactggcttttatgatcaggccacatggcctgacccggcatcagacttcgtggatcatctatacagcccaacgtccttctttcttacaccgcaggaaaggttcaaggcacccaattctctattacttccgggagatctgataggcgtctccctaccacccctatcctccccggcgggtagtggctaccgagagccgtccgactccgacttctcctaggatattacaaatatatttgccagctccttcctcccagacttgtcccatctagcacttcgagacacatccagtctatctcaggagcttttcgggatcctgcgtgagtatccgcgaatgatgctacaacccaacttctggtctcccttcatccaccgccgtctctaccggtgcgctgagaacggcatggccgagcctctcggtattgccctggcctgtgtgtcggcctactcgaactccgtcgagtccagccttgagttcgttgacaacatgatcaactcggaacgggagcggctggtccggcaagtttcacctttacagcgatcgtccggaaacctgtctcgccgccctgcatgctgtttgcatgtatcagattttgggactctttcgggggccgtccatggacagccatagatcggggcatagcacgttcttcaaagatgggcgtgaagggcgtcgcgacgacttgggcaaggccgcagaacttcacggttcctttttactgaaggtgggtattttagcgtttctcctcgttaccctcaatctacaccgctcattcgccgatcgccgtacagatgactcggggactctgcaagctgtaccaaaatgctctcgtcaggaacgaagcaggctggcccgagtggaaatttgccgaatccctccgccgcaacgtattcttcgtccacatcattaatatactcgccgccgaagctcggaagctgcaccgtgactactttgagccgttgaatgatgccatgattctacagatgccccttccagcaccggagtacatgtggcgcgcctgcagcgatgaggaatggtcagtggcccgcgaatacgctcgcccgacatcacctactccgtgtacgctccaggagttgcttgacctgaaccttgcgggaagtttggacgttgcgtcactacaacctttaacaaggatgattttggcgtgtcatagaattcggtctaagtttaacgatgcggatgattaaatgagcatatgattactctattctttcatattctttcgttgtgctctctaatcccttgtctacttggctttctggtgtcatattggtgcaagatcacaaggtcccgcgggcttgacgtaaataggactaaactcagataggaaaagaagcggtttaggttctagcggtaattaaacattcagactacccgaaaaaggcacttataccgctgcgtaatatcctctacgcactctagatagctggctcgggggagggtggggcgacgttgttgatggaccctaagcttaatttaccatgggatctccccttttctgtaatttccatatgtggacttgcaaccatgtatcaatttattttacttaggcactcgcacaatgctactgattcggaaacggacgaggtaaaataccctactgcaatggttatggtgagaactttgaacgctaaatcgtgttcgccattagaatatccaacctctagcaatcaaaggagtccaccattcagtatgaccctcattgtggagtgtcccccattgactcgccctcgcaacctctctgtacaattccatatcgataagactatccttgatgatattcaagtcaagcaaataatcttgtctgccagttccgtgaagtgacagcgataataactggcggcgtggtggcacttacgaacccactccaagtcgttgaacgcttgcaatccactagttcgcaggccgatgcgcggttgattggtagtatcggcaataaccaaggggatcgctgatattatcacttcttccagggtgtatgttgttgatgatacgttcatttaaggcctagagtttcagtattacttatggtgggtcacggagaggtgttgatataggcaatgatgacctcttggggagtccccgtacctatcacgcccagagtaatgcttctcaacacaattgaaatccacgagtggcttttcaccatatgtggatcctataataataccactcgggtgtttgatatgatcgcccatagctagcgggggccgttatatcgaacgggtgattcggtgagctggaacggccacggcagattgaaatggtcgcgcgtggggcttttttgacctgaacaacttctcaatattgaattatccaatagtgtttctcgaggtcaggtcactacgccaaccgcaacttctgcaatgacgattacgtcaaagctatacagctgtcttgtttttctctgggtcttcaccacaacattcgaacgaatatccattccgcgatcgaaagtcacgtggtgattccccttatcagaagctcagcctcaacaaaatacaataatctcagtccaaaatcaaggccgctgattcccggccgattaagaaaaaaaaaacctgcgtacagacaaaccccgtcgaaccccgttcagatcccgttgttgtaaatcccaatcactttcgaagaatgcgtgctgaattgtgtgaattcttttaccataaagattgccaaggctgcctaattaggcttagtcctaaacttacctttataattctcttaattctacgcaacgttattggctgagccatatgttccgcctttttcgtcgggattctgccggtttcaagaaccaagaataagattacataatccaaaaaatgacatgcatgtcaacctaaaatgccaacctcggaataccctcactttagacagcctctagctctctccaacgatcctttgatttcaacggggtttgactgttatcctacaccttaccattcttccccattcccccattcccccgttcccccgttctccatccccccatttccccatttcccccttccccaccggcagtgtcaccggggagatgttagcccgcgtacggagacatcgatgatcacattttaggcccactggcccctcttttcggcctttggtctgcaataggaggtgtttggccttttgtataaaaaaaaaaggtgaaacatatgcaggatgtaaagataaactcataaactatgaggacgcacttgtaccatctcggaagttcggccgggatgaatatgtcaaagatcatcttctcggccttagcccgagagaggacgtcggtgccaagcccgatagatggagctattgcaggagactgaaaaaccagaagaataacgtctccaatacataaccaggtaatactagccatatgacttaaatatggggcaattgacataatttgcatgtacactgccaatcattcgccagtcaaaatgtgaagaaaccggcggtatagctgtctcggcaggcggtagctacgatcaaggggtttccaagtaattaacctacagaaccgtggaaggttggaagctccaacagcagatggaccaatcataaaaggacaatacaaagggtccatatgaaaagtggacttgggtgtgtagtacatgtattgaccccgcaagaaagtcaaaaaccaaggacacacattgtgtcaagtataagttacagcatataaagaccttggagattccctcggcttcctctttcttgcatctatttgtgataccctgtgctaccatgtccctctacactaccattaagactcccaatgtcacttatgaacagccccttggcctgtacgatttcccccctaatatcaatgatcagttcgctaattggttgctgcttctaggttcatcaacaacgagttcgtcaagggtgttgacggcaggactttcgagaccctaaaccccaccaccgaaaagcccatcacctccgtctacgaggcttccgagaaggatgttgacatcgctgtcaaggctgcccgtgaagccttcgagggtccctggaagaaggtgaccccttcggaccgtggtcgtatgctgaccaagctgtccgagcttttcgagcgtgatatggagaccctggcttccattgaggccctcgataacggcaaggccgtcactatggccaaggtcgatattgccaatgcggctggctgcctacgctactacggtggctgggccgacaagatcactggccagaccattgacactaattccgagactctttcctatacccgtcacgagcccgttggtgtctgtggtcagatcatcccctggaacttccctattcttatgtgggcctggaagattggtcccgctatcgctgccggtaacactgtgatcattaagaccgctgagcagacccctctttctggtctatacgcctctaagcttattgttgaggctggcttccccccaggtgttattaacgtcatctccggctttggtcgtgttgctggtgccgctatctcgagccacatggacattgataagatcgcctttactggttccacccttgtcggccgtatgatcctacaggccgccgcgaagtctaacctgaagaaggttactctagagctgggtggcaagtcccccaacatcgtcttcgaggatgccgatattgataacgccatctcatgggctaactttggtatcttcttcaaccacggccagtgctgctgcgccggttctcgcttgttggtccaggagagcattcacgataagtttgtggctcgcttcaaggagcgtgccgcccagaacaagctcggcaaccccttcgagggtgacaccttccagggccctcaggtttcgcagcttcagtttgaccgtatcatggagtacatcaaccacggcaagaaagagggtgccactgtcgcttttggtggtgagcgccacggtactgagggctacttcatccagcccactgtttttaccgacgtcactcccgatatgaagatcgcccaagaggaaatcttcggccctgttatcgccgtcaccaagtttaaggatgaggccgatgccatccgcattggcaacggcaccaactacggtatgtattattcacattcatcgtgaaattatgatttgtcgttctaactgtatctaggtctcgctgccgccgttcacaccaagaacatcaacactgccatccgcgtttctaacgctctcaaggctgggtatgtcatatctcattatttactgctgtaacagagctaactttactgcagtaccgtgtggatcaacaactacaacatgatctcttaccaggctcccttcggtggcttcaaggagtccggcattggccgtgagctcggttcatatgctcttgaaaattacacccaggtcaagactgtgcactaccgcctaggcgatgctctgttctaaaatgaccaagaatataagaaatttcatctgggtgattgaatgcaatgaagtgatgatacgtgattggaaattttcgttttgtatagagtccaaattgaagaacattggttcctcaaccgcttttccgatacctcgtaggacttctatatttgattatgcgctattaagatcctacatagtcccttttgatcgccagaactattacatacaattagtaaaatccaggtgtttcatagtatcgttatcaagctaagtgagcaagcacaccataccagcctaagcaacagcggtttattcctgggtcattctgtgtaagcctccttcctatcaccttcggcccttgctatcgtgttcgatgttcgaggtccttgttgaaatgactgagtgaactgggcatcgggccgaggatccacatgcggaacgaacagtcaaaactccatttcctgccagacagatagatagtcttaagcaatacacaacatgaaatgacagccaagatcattgttcccatactcagtaatctaaacatcaacaaatctaaacatcaacagtccttccgctggttccatgtatgtaagactcttcctcaccatctccagcccttggcatcacgtctgagatcatttgccagatcaggtaggtacctatcgtcattcaaggatatcagagccagagaaaaattcgcgaagttaattcgagtccattttgtgtccgtgtcaacacgctcggctcatttgaatccggagattttcctaaattccattggcttgagattgcaagagattttgtaggacatacaacttgagtgtggccttgttccagatgatctttgacggaaccaaaaatgcggctcatagccgaacttcggaagttccctggatcgagtcagccgtggatacgcgacgatattcaatgtgcttagtgacaaccctgtatgcctcttcaaaattccagcggattttctcccacgtcgcgtagggaagagcccagaactgctagatgtcaagggattcgccttccacctgttcccatacaaggtggatgatataaccacccgggacaatgtcatgttcgtcttgttagccaatgcgatatccaagcagccgaggagtgacagagcattctttctctgtgagaagtttcaaggcttccaattccacatgatcacctggtggaccggcctggggtttccgcacatctgaatcctcaagtcgggtaccatcaagaggaatctgtttgtagatgcgcatgaaggccgtctctttcccgtcgcgacaatgatactttccctcggtgaaagctggacccatgccaacggccgactcctctggtgtgatggggattggaagttcgcttaacttttcaatgacggtccattcccaaaggggataacgagtagcatccgggccgtcctcaaagccgatagtgatctttttaccagacatattgggaagaaaatggatttcagccatggtgagcgtgtacggggaatattatggaagctaataaatgtcaagaaattggatggagatgaagatgggaaaagggaagaggttggtttgatggaggtgaggataaagtcaacgggaaagttggtcccaggtacaaattctagaggattggcgtgacaacattacatcaccacctagctcaatatacaaacatcttgatgaaaacaagccaagctaaaagaaaagcattatgctccaactgcgccgatcgtgattccattcggcagttcaagtccgatgggaagtccacacagaaatttgtcggtataggttgtcccgcgctttgccgcgagtttctcttcgatatccctatacatgtcatagctagttgcttgtcagtatttcctaacgcctgaagtcgatcgaactcacgcattcatttcctctattgtaagaaccttcttcgcgtcttcgactttataggtgggaatatctttgttgacggagaaacctatgcgctagtcagaaaataatgcaccacaacacccgttgaatgaaatccactcaccaatccgctcgttgatattgtaagccgccttggccgctgctgcctgcactcttgtaacccgaggcagacgtacctcctggtaaacagcgagggcttgggtaatatccccagagaaataacgcttaccaaataagattccaagtgctgccgcatcttcaatagccatgcaggctccttggctttgatgaggcatcatcgggtgtgcagcatcccccaagagacaggtgctaccgcgttgaagatacgggtacgggtcatggacccagagacgccatggtttgatctctgtcccaatcttcagatggtcaaacacttgtcggtctaattctgggtatggggcgagaagttcctcaacagggcggtcttcggccccccatgcctgtgttgaatagtcgccttgctcacgtgggaagaagcagtagtacgacagaagctcaccaccgttacagggtgacagaacaatcttatcccattttccttcctgtccaccccagtactccagtgcgctatcttcggcgtagttcaccaggccgagcctgatggcatcctcggttttgacattggtgtgcaagcagctctgatcggaggctcgcttttctggcgtaattccaatgattcctcgaacggccgacccgattccatctgcccccacgattaggtcgtggcttacaacctcaccgttctcgaagacgaccgtactcgtcttcagatcgatatcgctgcactagatcccaggcaatattagcgcatgctcaattacagacagcttccattgataactatacccggtagttcactttgagagttgctggcgctccttcgccctcgcccagtgccgaatcctttagcatggcatgcatatattggcgatgaaacatgttgtagacatatccccagcgcttctcataatcgtcgaggtcgtacacactgacgggctcgcccgtattccagtcgcggttgataagcttcttcaaaaccaccgggtcacccttggcgatatccacgttccactcgtgtagccagcgggttccattggcagcacacgaaaccgaagcgccgacttcacctgcgaagtccgacttttcgtagatggtcacagtgtgtcctgcacgacgtaaggcaactgcaacggacattcccccgatgcccccgccaataacgccgacattgagactcctccagcctggcatggtgaatatagataaatcaataaaacggggtttgaggcgggttgaagtgaagcagaaagatgtgagtgtcaagtaaaatatatagcaaattgtctctcatattaatttcttatctctatatcttctcatatatacttcacaggtcccgaccctacgtcggctggcggatagtgcactcgggtcaccgcgggccgcgcactagcgcttatcttcggctcaattcaacagcgttatccgatcaaaagattcattcacaggaaggctgaaggtaaagtggaaattgaaagagggaaaaacatacaatagtaaggacaccctatacagcgcaactaagatcccaggggtgggaaatccatatcacatttaggtcgtcttacctacttgccaaagctttccattctcagccttgtcactttctcgataggatagatgatttgattctgaaattgtattcacatgctaactagcagagagtctttaattgatcaaaggcgaccggtatgtaatactagttatggctcaattgtacgaaggagttcggttgaaaattctattaattttgttctatcaccggcaagccaggtgatccctagctccgtctctgaatatcatggtacggctagaagtcatgtaatagatagtgataccatatggataccatggtaaattacacagccagaaatatccctcaagtggcgctatacccgaagtagcttttaggtaggtggaaattcggtatccaacgtcgtggagagtgagcaatgagatgatgcaagtgagagatttcagggctttagaaaccagcttttcccagcccgctgtcatgattcataaaaggaattcttgattgtaagtggagataggttgaggttgggttggaatctatggtttcaataaggtttgtgacaatgagctgttgcattcttcacatttcttgtctaatttatgcttctacagtccctcttcaggtcggaatgcctcttcggtccgaaatgaagagaagacccgagaggaatgaagggatcgggaaaccgagaatatcgggatcggatcccaggagaataggaggaatcttggcttcccataccattgatatcttgatgggaacagcatatttgtatgagaatgcgtgggggtcgaatgcagtactaaatcagggctgatattggatcctccatctttgaatctaacacctgaatacactgctagaagtcattgttcaactgaatagacccggcctaatttctgcagtcttctgaatgtggtcggttaaaactaatgataatcaaggcacatgatagccttcaaataagtgtttctataagggcgaaaagactaaccacaaccctaaccttgaaggaattcgcttcatcttactttctatgcatccctcgctttgaaataccagaaatatatcactcatgttgcactgacattcacccccacgccggggtgctccttacgtagtccttaaatgcgcttaaacacgaggataccccacgcggggagatgatcttttctaaatgcaacctcgtcccctgttgtttctccccacaaaaagcttctccccacaaatagccagtaaatgatgatatgatcggggtaagtccggggtctggctttaccccggtcttttgcaggttttctgcggggaaaggtattcgggtgtaccgtcatataacatgggtttgattggaatagcagttatagcccagcaagttttgggcattgcttcttatgccatactgctcccggaccactagatatcaacgccacatatctcacccctgtagaggattccacacaactcgcaactcgtccgacttccgagtctcactttccacgtgtgatttttttcttcttctccctccttataccccttgcctcctctggtatcttcttatcaactttggctcagactttatatgaattagctggtgtagtcttgctgcttatttatccttctctcgtcttcctcatacttcctccttctcatattggaaaagcaaacagaaatgtctcccagaaactcagacatcggggtgggagatattgacaagtctcgcgtcgacaatgtcgaaatagtcgccaatgccgacaggcccaacccacagaaagaagcccccgaatacgttgccaacctgacgcccgaagaacgcatgaaggccgagaaagctctcgttcgcaagattgacctgcgtctactacccatgataatcatcatgtacattctcaactacctcgatcgtaacaacatcgcctccgctcgactagcaggcctcgaggaagacctagggcttgtgggcaaccagttcgcgacctgtgtcagtatattgttcgtcgggtatctgttgatgcagatcccatccaacctgatgctgaacaaattcggcaagccagccctctacctccctgttgctatggttatatggggtatcatttccaccgctacagccgctgctcagagctacaccggtctcgtggtcattcgcttctttctaggtttcgtggaggctgcctacttcccaggctgcttgtacttcctgagtgtttggtacacccgcaaggagttgggcttccgcaccgcagcgctgttctctggatccttgctctcgggtgctttctcgggtctgatcgcagcaggtatcactaaaaacatggacaacgtgctcggactgcgcgcctggcgatggctattcatcatcgaaggtgccgtcactattgcgattgccttcatctcgatcttcgttctccctaactttccccgcacgaccagctggctttcggaggaagagaagcaactcgccgtgtggcgcctggaagaagacatcggcgaagacgactgggtcgacagcgaacagcagaccttcctgcatggagccaagctcgccttcgcagacatcaagacctggatcctgatgctcatgatcctctgtattgtctcctccgcctcagtcaccaacttcttcccaacggtcgtcaaaacactcgaatacggcaacatcgagactctactcctgacagcaccgccctactgcctggccgtcatctgcgcatttaccaacgcatggcacgcagaccgtagcggagagcggtacttccacgtcaccggaccgctatacatttccgtcgtggcattcatcattgctgccaccaccacagctaccgcaccccgctatgtggcaatgatgctcatggtgccgtctttctactccggttacgttgtcgctcttggctggatctcaaataccctgcctcgaccggctgcgaaacgtgccgctgctctggctgctattaactgtgtcagcaatggcagcagtatctatgccagctatatgtatcctgattctcaggctccgagattcggtccgtattcctctaccgctggctttgtttctagcagtcctaactaatcatcctatagtgcctgccatgtctgttgactgcgccacggctttcatcgccattatctctgcaacggtgctccggtttatgctcgtacgtctcaataagaagctcgatcgcggtgaggaggttgagggggctgtccctggtgaaggaagccgtcgtggtttccgctttttggtttaaatctggttatagtgttatttttatttctgatgcctatgtggctatagtatacgtgctacactgggatctgcaatagatatatattgagaatatcatttgacgaccgtgtaagaggtcatgattatatatgtactatgctccgcataacacgtagaactagatgctaagtggattccttccctttccaggctaattcgtcaaagctgggtggcaaaatccgggaagataccatttaacgcgctcaacaaattggtgaatcctaaagccaataggactaaagtcctagtgatcactatgcactgcgataccaaggtctaaccgggtgttttcctccatgcacgttacgggcttgcttcggaggtggaggacaagaatacataccttgtggtcatgcctgggagttgttataaaaataccatcttctcattacacaataaacgcgtgataaagatatacataataatatgctcacgaatcgaaaaaggccgagaatacaaagatgctgtaaaaacaagcaaatccacagcctcaagtcatcctggtctgtctatgcaattcggatagccgagtgtccggggagaccgtttcccgtttccccggatattccccattatccgaatacaccgggccgatgatgagtgccgggaagtcctgaaccgcgactgaaaacaccaaaacaaagctgtcggatatcatgtccgagaatcaaatcattttaaaaaccccaaactccaaatctatgcggtataggaagatgccaccaattccaaggtagcatttaagcattgttatccaataccccgaatgggttctcgccctttgtgttcgggctagaggaagactcctcggccctttgcttcttagcccccttcttcgcgggaaccttagcgaacccctgttcagactcggaccggctaaccggggccgaggcagcatttgccttggaagcagcagccgagcgggtgcggactggcgagtcgggggtggtaaccttgccggcgatcttctgggcctgagctttgatgacctcatcgtcagtggtagcttcgctgttctcgccctcgatggcagccttgcgaatttcacggctcagactcttcagagcatccatgccggccttctcagcggcctccatgtgcgtgggctgcttcactcctacatccttgcgattcaggtaggagcggacgaagaagcgcgcaaagaggtaggtgaggggaagaaggtaggaaacgttcaaccagatggcgaatgcctgtccggtggtgtccgcacaggtcatcatctgctgggagtagccggattgctggacaggcgcggcggtgaaagaagtgcccacgttctcggcaagtccttctgcgcccgcagcccggaatgccagcttcttcaaccaggagaccgcaccaacatcggtggtggcagaggcagcggcggaagcggcatcggtcaggtgttgtaaggcggcgctaccggacgggtaggggatagtgtagtggacaaataggtaggcggcggccatgttagttccgaagacgaactgggtgatttgcatggtggtcaagctgcgcttgatggcgttagggacgcgaatgcggagggccgtgagggtatagtaggtgtactgaagtaaaaaaaagggttagtaagtttgcttaacaaaagcaatgcgattgtccgacttaccatcatagcatgaatagccgagttaaccaagcagaagatccaaatgggagctgccatgtagcggataccagcccacatgcacatcatagctcccgcgtggtggtaggtctgtagggtggagctcttcttgcccttggccagaatgatcgcggtgtcgacaacctcgtagaacttggacagatagaagaaccagccgaagtaagccaagccctggttccatagacggccagcatccgtggggtctggcatgccgttggtgaggtggaaggcggggttgggaatcgaccactcgtcagtaatggggctgtatgtagcagcattgccgtaaccgcggggcccattgatcttgcatagtgaatccacaagtccgaccagtccgtaggggtcgtcggtatccgggaaagagctcctgaatgccaggaacatgcctacgaaggtccatgcggaatacacagctaggaagacattgtgaagaacgacgaagagcttgaacaaacgagtgttgctgaacgcgtatggcttatatccgcgacttttgttgatacggttgagcaggaccacagtgatcgcatagacactggcgattgtgattggtagtcggacgtccagcacctggttatagagatcgttcgggatgttgaagggctgcttccatgtcggggtgtcaacgtgaggtgcggggacggtcactggaagctcatggggagggaaggcgaggagagaggcgggagggaaggcaatgcgaacaatcgcctggccaaactcggtgggcacatggaagtcgtgcatgattatcgccaacgcggaagcgttcaattcaacgcgtcaactagggagaaagaatataggagaaaagatatgattctaaagaagaaaaagaaagaaaagagaaaacggttgaagtgttggaagcccagtggatcctccagataaactgcccttgaaatttctcaacaagggcaatggccgacgatctcgatccgcccgcgtttagtttgttgggaattccaaggcttggctccaaacgtgccgaggttggtaatcgccacttgcctagaagagtaacacctgtgacctgtcgtactccatttatgtacgtgcacccgtggacatacggaatatgcaatagtggacttttctcaattgtatacttcgtgcagagtaactatggtgtatatatggccagaattgagcttccgttggggcattgacctataaattgcactgccaacaactaggatgattggataattctccgatgtctttagaagatcagaccgggaagtccggacatgtcgggactccggcccggtgatctgatgccatccgcatgcctccaaagcctgtactttgcagatgccccctacctcaatagggctgggtggggaaaagccgctgagtcagctggacaaagttccgagttccccggaacattctcaaccaaggtttggccggcaaaggttaaattgacaaaaaggcttggagggccggaactgtcaaggaaggaaccctggaaggtgacctcggattatccaatcgggatcagctgcttgttgggatactccagggttgaaccactggaatcggcccaaaaatgttggggatctgaaatcaggtatataacaaccctaatccgatcacatgcagcctcggtcttactggatgttgaatatgaatgacccaagcacgaagatatgagactcaccaggatagacagggactatgatgtacaactattgtacaccgtacaggacaaatatatcgtcatcatgacaaattgttcgatttccatcctaaaaaaaaaacacccatcgacgccaggaatgcacaacgtaacaaatacagggttaaaagtacagtctttagcggggcttggtgtcatggggaataggaggaggccccccgagtggtgttggtgacgaaccgtcaacaggagacgcacgaaattcagcccgcttaggtggaggcggtggaggagccttcttgcgttgagcgggttctgtggatgagaccgctgaagaattagagtgggccatggggatgggacgagcaggtgggcgtggaatccgtttgttggcttcggcggagaatttacgatcctccacaaatgtgttgaaacgtgatgtgactccaccccatttctctttacccaactcgatcttgtcggcatggcgttcacggaaatcttgcacggaggatgtgccccgtgcgggctccgccggttccaggttcatactagaagtattcgacgcgggccgggccggtgggctaggcgctgctggggaagagccagtgagccgtgacgcgtaaccactcaacttctgctttcctgaatcgatggtatctgcgtgacgctcacggaaatcgccgtatttctgctttcccgaatcgatggtatctgcgtggcgctcacggaaatcaccgtacttctgtttccccgagtcgatggtatctgcgtggcgctcgcggaagttatggagagaagatgtgctacttgcagggtgcgactgagcaggcggggtgggcgccgatggagatctcgtgttcatctgggaaaagcgtgactgcagctcattgacaggtgtatgtgcaggcgacggagatttctcctggccgattccaaatccaggaaccgagacgcccgcgtttgctaggcgggacgtagcatcttgattgatataatcgtgggagagtaccgggccaggggaataagcggggagcgattcggagctggaggatgcattgcgggcgggaagtcgtggcgggggctttggtggcctttgctttgagattgagctcgaggcggaacttgcagagtccagtcgccgcactggtggtggggggagattgtctgtagaaaggccacttgtgtcggcgcgatacgggattggtgggggcggcctttggtactgttcctcctctacttcggctacttctcggcgatggggatcctgggcggttgtctgatttggcgcagcggcggctccatggtaattgatatgtttcggagggggcccaaataaagatgggtcttttagggccgacaagggttgtgagacatgctcggagcggtttgagctggtttcattgccctttcccataaacgatgcctaaaagcaagcaatggttaataccaatgggccgcgtcgtgaatacacgaagggttagcttaccacgtggcccctgatacccccctgtgacgaggagccgtgtccggagctggaggagtcaccttcctttccctttcccatccaaccggcctagtagcaaatacaagtcagcatcaatggccgaggtgcgagtgagcccgagaagggtgaggggtgaggggtgagcttaccactgagcctctgatacccccttgtggctcaggggtacgtccagagccagagccagagccagaggattcaccttccttgccctttcccatccacccagcctaatagcaagttcaagttatcatcaatggccgctagagttacaagtcccagagggacaacgaggggtgagcttaccacttggttaatgcctttgaaatcacctcgccaactctccttcccaccttccttgccttctgggtgccagccacccttgatagtattgcgtaaaccactcattctgctgcagacggaagtgcggggatgacaagttgctagttaagtggtaagggaagctgtgacggcaatatccccacttaatcacgtgcgagcttgatatagtaattgatctacagtgtacatgtgcgtagactagttataggacataagtgaataatttatgatcgcaaattctaagacaattcaactgaattcctaatgttccttcacgtgcttcaaaatatttgattgccaacagagtaagcggtctgaccagattctgcgatcacttccagaataagtaggcggtacatctctgccccaaacaggggttataatgaactttaagcatgtcttttcgcctgcatatggtcaaatgaaaatatgcagagaagattagcatggcccctgtactaaggatgacacgctcaatcaaagagaagctacctaatttaattttttttcatttacctgtccttcgttatggagataggatgcgggtctgcggacttacaaagtccatggatctgattggtcctactgcatttggaaatcatgtgatactacaaagacctcgagacgcgcgtctggcggttccagttatttgtgggaggcggtcaatagcagaatatatgttctgccggatagttgagggcggtgggatgataataggaagaaatgcgttagtgacctcttcggcgctgaagaattggcttgataggaaaaaataatctattaagtatatctaggtatggatttgcatagttgaatgactagccgggtcaggattgcttaacaaaattcttcagtcaagactttcttggagatatcgtcgactgagatcgttctcaatccattgctcaattagcccaacggtatctccaacgaggtgatcgtagtttgcaccacgtggaataaacatagactgatgtgccatgacttcgtccatgtcttccattaatatcggcacccaatgggagttatcgttgtacttccaatgatgtgacggtaagagtatgaacttgcggaggtgttgtttattagggtctgtggactccgttgttgtgatagagccattttcagttgagagagaaatgctttctgagagagactggctctctatctggtcggttgaggttgaggcagacgctgcggtacttgtgtgatccgccagcggagtactgttgttatcgtcggccttctcgatcgccagggaagaatgagaagtggtggacttcaagtgcttggtgtcgattgccatgttgctcatggcggtagttacatcggtttgttcggagccacttggcgtatctgagtgttcgtgcgaatgtattttcgttgcagattcatccatggcaatttcaccctcccttgcggactccttgtcttcctttttagactttttggctttcttttcggcttttggcttgggtggtcgtggcttgcgcccagtgctcgcggtatagtaattgacaaatcgtactctccaaggactggactcagcttctagctccatcaagtgcccgtatcgccgacgaagttcagagtaattattgacacaaccagcgaatttgaagggtgatacgactcgatcaaagatagatcgtgagagatgatcggtgtttttgttgacaaaatgcaaaacaccactgagaaagccacggtcgaccagacgcacatcattcttgaatggtgggtcaaagttggggctgaaatgggcggatttgaaggccggttccaagcccagagactcttgttctcgcgcaagcttctcttcatctgccgcatctttctggggtattaagctcatggttcctgttgctattacacgaggatggatccccaaaaagggaacatcaaatcctactaagcctaaaattcgatgctttgggtgcccatcttgctgtaagaggacaacgtctgcagctaggattccaccgagactatgtcccagcaagatgacatcaaggtcatctgcctcatgtggcgatagcctacaagtgcctccattagctgtgtacccagttaagaatcaagtaagaacgggctttctgtgtcggcacataccaggcactaaactgatccacggctgtttgtatctcgccttgagatttgtatctcggatacatgcgggtaaacaccacgtgtgactcatccaacgaggctgttaacaaatcatgaacatgtagcggcaggtcatgaaagctcgcttctgatcccatgaagccatggatataaatcagtaatagtctgcgcttttctgtggcctgatatcctccggggtgagggagcgacaggctggaatgagacccatcggagccagtacgaatattccccttcatctccatcgccaaagagagaagctgagataggaaaaagaacaacagaattcccttcttggatatccccaacgttccaaatgcggggacttcttggaacctgaagttgccactgctgactaagccaagcggttggcccggagctccaggagatcatatccacattgaatacttcgtatttagagagggagaagatagtgtttgaaggtgtgaaggtctttacagtattctagtaatctttgcacataatttttatactgctctgtgtccaatctctgctatcttccgcgacttccgcgactggcagaagaactatacaatcactcattacatcgtaatagttatctcatacctgtgttgttgagcaacagaaaggatgtggatcaagacattatagtttcatgcgtcctatgataatatctcatttaggctagtagaattcgcagatttcgaattatcacctcattgatctaattttagtattgtggtcccaaccctgatatctacgaattatatacggagtacggagcagatctagatgatttcctttccctgccagaagggtataaataggatggacattgggattgtgatagtacatattatattcaatacaacaataattccctgacactgatctcgattttctgatcgatcctgctctcactctcccctcacttcgaagtcacttctctctctttttttttcttctcgattttatcctgtagcctccttcgtttcagtaaaggtgtcacgatccacatggatcgctattacatgcttcatgtttgcttgctcgcttacggagtactgtttgcctatttgcttgattgctccaccagatcattctagcacctagctggaaagatagaatatatcaagcattttttcgtctgatattcttgttctgttggcatatggctgccaagctggttcgtgcctgggctcttaggtaaagtactttacgaaaagcctctcgagatgactatttcaagtatctatattcatgattactgattgacaatacctttgttacgatcgtaacgtttgcttgtttgtttctttacttgtttgcattgtttacaaagtggtcagctatctcccacattgcaacttgcttcttctttctcagttattctgaattaaatgcactcttctttgcaagacctggcttgtcacacccccttccccccgcctgaccgcccgacccccctcatccagccctggagcgctcggaggggattgatgaagcagagacacgcctcgcacgtgtcctgtaggcttatctccgcgtcggggggctatcaaactgtcaagtacagccagaccggtgaagtccgtcacagtagatcatctagcaggttgcaagtgcgaggggtgtcgagacgacagatttgcccgagcggattcaacagagcgagggggtaaatgagtgcgaataattcgaagccggatagttgagttatagcccacgcatttgtatcattttatgtacattatggcactgaaagcagaaatggaggctgtactctcatcttactccttgttaagatggacacttactattggctcattgaactactgtcagcattggcgtcaaagcataatgatccaataataaagtgccccataaaacgttagacaacttacgaactccctagttagggttgatcctacgtggccccatattagcgcaaactgtcgtaaaaatagactgagcatctctaagcctcatggaaaatgaggtttcgatgatttgtacatctcgataattatttaaattattatgtgacgtttaatttgaggacatgttggttcaaagggatcagagtaatatgagatttcattgacaagtctaatgcatgtcgaagcgcttctttgttagagtctctcccgagggcagtgcttccacccccacctggtctgctgtgcatgatctatgaatatcacttctactcttcctaagacttttttggcatctcgcatttcttgctaccttccgacttctttcgaatctgggcatattatattattctatacaaagatatccgggaggtaggtaaaacggtacctaaaacggttattgaatgggagaattctagcgccagtgtcttttgtactatcttttgtggtagttctttgtcttcgctttggggccttcacataagacaaaagtgccccgaagaatccaacctcaacccaccatacctgctatggcaagattcttgagattcttgccatttgcaatgttgggcactggactggacgatgcagatacctcggattcctatagatcggaatatgccccctcatcggtggcatcagcgggccaggatgttgtattcacgacagcacccggctcaaaaaacaagaattttgcagacgcgtcaagctgggcagatccagcagtgacaggtatctttcctggaacagtttcatggccctcagtcaccgagttgaccacatacccagcatcaagtgagacatcgactgtcaatgatatcagttcagaagccagtccgaccagcgtactggatgcaacatcatatacttcatcaccatcaccatcaacatcgaccacaccgtcaagtacattcccatcctctctcacatccaccacaacaacaaccacaatctcagcctcagccacagccacagcctcagaaacaaccgcagtaaacagcgactcaaccactttttccggtggcccatcaaaaacaacgaaaatcgccatagcagtcccagtctcagtaatcggcctagctctaatcctagcgctgctattcttcctctcccggcgacggcgccgggaaaaggaacgcaacgccttgccaccaccctacgacatagcagcaggccatcgaagtgcagtatccacacaagagctaatgatatcaccgaaatcctcgacaccagaagcaagacgttcactctcgaacccagctatgtcctcagcggccacgtcaatgcctctgcctcttccccggatcccgattatcagcatttcgccctcgacggaaagtcggggccggacgcccagtctcggtcccagtcctgactcaagctccgtgcgccgcatgccgacggcccatggacctggtgattctgaggcggagcttggggttgcggtggctgtttcgatggcgcagaggcgaagtgctacggagcaggaccttagagctcgggttgcgcctgttgtatcgtcgagggggccgtcgcgattggctaggatgccgtttgaggacttttcggatgatgaggttggtattggcattggtattggcggttcggatgatgatgacgatggagctgtttctgatgtgtcggatttggatgggcggaggagggagagggactttgatgaagtttctgtggtctcgtcttttgatgaggtgtcgccgataggtgagcaggagaggcggtttcggggaacttgaaggtgccggtaagatgatatgatataacgaagctaagcttggtctagagcttcttttacgtgggtctcttttggtccttggagtttgtgagtccgaagttttcattgtaaggtacaagttgtgtatttcagactacgtatttgaataggactggaatggtatcctaaccatcctaaccatcgtagttgtcatggtattgggcatttcgaggccatgtgcagtgtggaaatgaactgttggtgtctattcttattccgattatcttgcaccaccgaattcagccttgtgggctgtggcctttccgtgcgtcaattcccgaagagccatggtggcgtactggcttgatcccaactggaatttcaacacaacggccaacttatcagctgcagtctcatcggccatagcggtatcggtattctcatttgcaggttgcagattttgcaaatccgtcttgacaaactgctcatcgtccttggaataaagtttaatatcgaaagagtagttggctcccaacatgcggctgaaaatcttgcggtagccgccgctaaggctgatatccttccacttgcggcgcatattggacggatcaaggccaccaccctgctcgctttccatgaagcgacggtagaattccttcatttcgttttcggggtagataatgtcatatccaggctggggaagcaccaggtcaaagatggtatatttgccactggctgcctcttcggccgacagggcacgggctcgcatgaacatgtcctcggccgcaacggcactgttctcgccctgaggaacaacgataatttcaccgtcagcatcgacagtctcggcagcctcgacagcagaggcagactctttgtcgcggtgctcttggataatgaccagatcgccttccaccacccggtccccgtaaaggcgccatcgctcacttgcagcgaagttccagacaagcgactggtatgcgtgtacatacatcaatcgcaaggtccgggggatactctgcaacgcacccaaataatccttgctgctccttccgaggtggcggatgagactgttttcagcggagaacttgcgcggcatctttagcagagcgtcggcgacgctaccgccggtctggaagatattaatggccatggcacgatctttgtcatcattgctgatgttagcagtagacatatttccctccattgccgcctgaagagatgcaggggcatactgcagaatagcatcgcatgcgcccttgaaatctccctggagcattttgacaccgactgtatccgttcgggttgcgaaggttccaaatcgctggagaccgtagtagttgaagtatcctcgctggtagagattcttcaaagaagtaccgacgacctcggatgccttggcgatcgcagcctgaggatcgctcatgctcacgccgggaatttcaacgtcgcgcagagtaatcacgaactcatttccctgcaaatctccaaggtccaggccatgcttgcggtactgaaagtctccaatacgagcattgcgaagttccgagttcacttctacaagccgggcgaggcgaacgcgcacagcacaggcacgctgcacggtcacaccccgcctatccttggttccagcaaattggagagccttagcattcatcctcaatgagcgagcgatgtaattgatgacttccattgtgtccttgttctccttgtagatcgtgaaatgcagatatggcccgccgagttcttcccagtttgtccgctggccctggacccgggcgttggcgcgtcctgcggtcgcaccgcgttggaaacggttatttgccgcagtgattgacatatttccatctgcatcggtagtagattctagctgggaattgaaaatgcgacggatggcctggtggatcttggtgcgaaggtcccggtcagacacggcaaaggtgacactgccgaattcactaggtcgaccttttggcttagccatggcgaatttatggagcgcaattatttcggcagcattttgagcgccaaagtattcctccagaagagtgtggtcctcctccgagactttgatctgagctggtgtttccgcttccttggctggggtttgttctgcagcctgggcttgcacctctgggactgtcgacgcaggcgtacgctctgtaacagtatttacagagttgtcgggctcggtgatcgtatggatgcttcgaaggtggacaacttcgccggtggtcatgatctcattgaccataaaatctgtgtatctgcgcatgattattagcgcaattctcaagtggagtaaataatagctcacctcttcttcaggatacccgagaatccctcagtgttgctcacaaactccgtgataccgacctcgacttccttcagagcctgcgcatctgagactgcggtgcttggagtgtcagttgcgccattgacagcgatggcgacctcagttgaccctacatcctcagtcttctgtcgcttgcgcggggattccacaatatctggcttctccatattgtgttaatcgttcgtaatgagtggggttagatggagaaggttgagcttcaggaactttttctttaccgatttggattagcgtggaagggccaagtgtgggtcagccctacttaccgcattgggatgggaacttcatacttcacttctacatttacctcattgaacgtttgactctttcaataatcatagattcattcagagctgcctcaccatgtaatttctactagctctatactgtattcgatcataaccatagttgtcataatacagactaagatactcccgataccttcaatgcctcaaatggaattaatgtgttacaacagtggtgtaacaatttatcatcaatacacagaaaggactttaagtgccaaatctagaagcttttgaaggctagagcccattgtcgcgagctattataaaatgatcgcacatggacactcccgatgcaactactatccccaactagaccattgcgacgacaatcattacgcacaggtatattgcctcaatttcagtctgagaccatcgttatgaggtttatagtggatgagaaatttggtaagctacccacaatgatgattcgagtctgtgaaaacgttataatagaggctaattgtttcatagactccggtatgtgatcgtaggtataatgtgagagttaattcgatattctatagattctcaataatggtcatgcgtaagccaaaatgctgcataagcttacatcagatcgaatcgaggtttttcaaagtagccagacgaatttgaaagcatatatgatttcttatggaggtctaggcggtctatacttagaaagtcgaatagataccagagcgcaagacagaagtaaacatgccccagttaaagagccgaagcgtatattgtattcgaaggtatgttgcgactcctaatactctactcgcttcactcaaatataagacatccaatcccaatcacaaagaagccggtaaaggcaatacgcgccagaaccaggaaagcacgaattctaaataagacgcccggacagctgcgcatgcaacaaaccgaagaaatcactcaatctccgaccacagctgagaaggttggctgatcggacttgtgctctggaaggaaaccgaaccagaacatcgaggtataaaatgaaggtattcgcccgctgttctcgatatcaattctacaagaatcaaccttctatccaaaatcattcagtgagcctcattactatctcgcgttcataacaaaccgcaattgagcggatcattgactgtcatcgcatattagctcaatctaaaacaatgaagtctaacttccttatcgcgctcttcagcttggctctagccgctgttgctgcccctaccggtatgtcatcagctatgcggcgttgtgtttagtcgatcacttctgattgagtggccatgataggtcctggcggtagcggacttggcggcggcggtggttccggcggctctgtgggcggaggtggcggtggcggcggttcaatcggtggaggcctcggtggtggctttggaggtggcttcggcgctggttctggagccggtggtggtcttggtgccggtgccggagatgggatctaaaaaccttttgaggctggactaatgcgcttggcattgtgtagtcttgaggtggtctcctaataggatgataggactggcaataacagcttcagccctacttgatttgcatgtctgaatgtgtagtggtctctagagtacagttggctgtgaagtagaagtctgtatggtaaaagaaaacagaggaccaaacataataaaactgctaacgctcagcccaaactccattgtggttctttttctatcttccaggatgtggtgtgtgcatgatacatgggttgcgttagaataaaatgctctgtacgagacaagtgtgaaaaaaagggggaacaaatgttcaatgcataacaaaaacggacaagggaatggttattttacagctcatctttgggatcctccttagtcttgggctgatccttgcccttgcccttgctcttctcggcatcgggcttcttcttttctttagatcccttcttaccactgctgctgctcttcttcggctgaccggcgtttgcagtcattctttcgtacatgcggttaaggatgcgctcaaactcgcgcagccgcgagtcaacctccaaaacggtcaaagctgggtcatcagactcggaaagttcctcttgcagactgagctgggtttcgagccagggctgggtggactcgtaggcctgggtgatggccgtgaggtcagcgggagtgaagagggagtacttggggcctgtgggtttggccgtagcggcactcttagtagatgtggtagaagaagaaccggagtatgggtcttcatcgagatcatcgagatcaccgagagggtcatcagaagcggctggggctgggggcgatgagctggtctcggtggaggtggaggaggcgcttgaggctgagagggaagaggagtagagctgctcgtcgttgtcgatctggttcttgatcaattccttcatggactcggcattcttgagcatgtccttgagcaactgcacgcgggctgggcgagaagagctctccttcatccgcttcagtgcagggttgacgatggccttaaggtccttgagcctcgactggaaatctgcagtcttggcgttgtcgctctcatcggacagccagtcgctggccttggagactctctcggagagtacaactagttgatctggcttgactgcattgatgaactcctcgttctcggcgagatctcggctgcggtagatgaaagattccagttcattaagagcctcttcgcgcaggatgcgatcacggtccgaatcatcgaaggcaaggaggcggcccttgatgcgactgagctctgcggctgatggagccggagtgccaagcgtcacagacttcaagctgatcgggataacttcaatgtttacctgaggggtagcctttgcgtctttctttgcgtccttggtggatgtggtggtggtcttggaactggcggaggatgcaggggatgattccgtctcgggctcaagggtgatcgattcacgcggctctccatcttcgccgaggggctcctgctcatccttctttccaaggccgaagaagcccttgacgtcttcgacaattcccttcttctcagattccacctcgcagctaacggtaccagccataacttcgggaagaccgtccacagggctgagacggatcgtaaacttcgtggtaatgtttgcggtggtgcagccaaagttatccttgagcctggcaaccgacgcagtaaggttctgtgtctggacactgaggatgggctgttcttcatcctgggaaacatgctgagcgaagctgaattcgaaatcctccaggttcttcacggtgacttgcttctcaggaccgacctgggaagtggctgtaaacagcttctggtttctttgcttgccatctgagttccacttcaaggagatggggtacgtagcggcgtcaccggtgcgaatgtccttaacacggaaattggggctcaaagctgctcccttgaaggcggcaccaaagacagccgcttcatccgcgttgacgttagttctgattttcttagaagagccagcgaggctttccaattgcttctggacgaacggagtccgaatggctccaccgtgcaacacgacagattcgatatcactcaagtcaaggccggccgctgccaaagccttctccactggggttccaatgcgggcaacatactcagcagccatcttctcaaagttggcacgggtcagcttgtacttgaagttgatgttctcgtcgtacagtccctcgaagcttgtcgaagtctcagtgttggcgctcagaacctgtcgaagcttctcagaatccttccagagtctggacatagtctttccatgcgccttaatttcagctggtgtaaccttatccttgagtttcgtatcctcaaccaagtgggcgaccatgtcgttcacaataaggtcgttcagggagtcgcctccaagtgacttgtcccaaccagctccaacaacatgaacttcctggatagtcttgttgaatttgccaacatccttaaccttacggctctggaaccgcaaaacactggcagtcgtagacccagcacccatgtcatacacgatgtggtattcgggcttctcgccatcagaaacgctggggaaagtacggctggtggcgtagttcaaaccgacagccaatccatcactgataagagcctggattttgaaacctgccagctcagccgccaactcgaggctgcgcttctcctccgcggtgtagaacacagggtaggtaatgactacatcccgaacatcagatccctttccggccaacgtatcagcattggccttgatctgcttcaactgcattgccagaatctcctcgaccaagaaggcgtctttcttctgtgcctctcctagccggttgctgcggagagcaacagaaccgcgaccatcgggggcggcctccaatttcaacgcggggaacctgctcctataattcttgactgcctcctcatcgccatcgttgaatggaacgcccaacagagtcttcaggttgatataaatgtcgtccgggtaccgagctgccaaggcgagcgcatcaccaccatagaaccgttcggggaaaggtgcatcgctctctcttgtaggcttgaaagcaacagcagcggactccttgcgcttcgaatctttagtgaggacaatctcaagcggaatgccgggtttcacaagagtagccttgaaatattccgtgccgatgtcgatgcccaggacggccgatccggcggcagaagctgacccagcgaagctaaggaggaatacgagaaatggaaggaccacgagggatagcattggcgagctggataattgtcggcgatttaagaacgccattatctatgtgtaggctccgggctgccggagtcagccaaatcgtcgattgaaggggtttcttgcggttttaacagggaaaacatacccttttccgaacgtatatagacaaattgacagatattcaatcactctgcctgtttgccgaatcgtgtgtcgcggtttgggctagctttgcgccagatggatgatcggagggagctatgggatagctcagagattggtgttgggttggcgggtgggtggtgggggcggtgcttagaaaaggaaaaccaggatgactcgaaattaggccatctgagaccaaagggatactgtggccacttggcagtaacgtaacttgaagcctaaaagagctattggatgaggacacgggtcattatgcaaacacatcgggcgacgtttgatgtttgcactgcttatcgttatcgcattatgtcatagccctaattccaaatagggctgaattgtagaccagacaacttgtggatgttaatttataaccatgatgaaatgtgggtgtacaattaatgcaaataaacttcaatttgcaaactaatatatataactataattagggtcccataatcgtggataaggagcgtcaggtcgtcaggagacccattaataaccgccatcctggcgtctttcaagtgaatatgtcagaaacaaatttcttggatgttttcgttgtctttttttcttgcgtgggattatcgtccgatttctcgctagcccctgcccaaagcgatggcatcatatctcatctgacagatcaacttccgtgtagatcaattagagcagagcaaacaggagagccaggccaggaatcatggccacagcagacttctggagagctggagcactattgaacacaggcgaggaggaagcagggggagccgaggtggaagaagtgatggaactcgactgtgccggggcagtagacccagtagctgaaacaccggttggggtagctggaacactggactcggtagccggaatactggtctcggtggccgggacagaggtctcagtagccgggacagtagtctcagtagctggaacactagactcggtagccgggacagaggtcgcagtagccgggacagtagtctcagtagctggaacactagactcggtagccgggacagaggtcgcagtagccgggacagtagtctcagtagctggaacactagactcggtagccgggacagaggtcgcagtagccgggacagtagtctcagtagctggaacactagactcggtagccgggacagaggtcgcagtagccgggacagtagtctcagtagctggaacactagactcggtagccgggacagaggtcgcagtagccgggacagtagtctcagtagctggaacactagactcggtagccgggacagaggtcgcagtagccgggacagtagtctcagtagctggaacactagactcggtagccgggacagaggtcgcagtagccgggacagtagtctcagtagctggaacactagactcggtagccgggacagaggtcgcagtagccgggacagtagtctcagtagctggaacactagactcggtagccgggacagaggtcgcagtagccgggacagtagtctcagtagctggaacactagactcggtagccgggacagaggtcgcagtagccgggacagtagtctcagtagctggaacactagactcggtagccgggacagaggtcgcagtagccgggacagtagtctcagtagctggaacactagactcggtagccgggacagaggtcgcagtagccgggacagtagtctcagtagctggaacactagactcggtagccgggacagaggtcgcagtagccgggacagtagtctcagtagctggaacactagactcggtagccgggacagaggtcgcagtagccgggacagtagtctcagtagctggaacactagactcggtagccgggacagaggtcgcagtagccgggacagttgatttcattagcaattgaaatttgtagaatagtcggagcttcattcacctgggcaagtggtagtcgtgtaggtagtagtcacgataaccggggtaccaggggtctcggtctcagagggagcggtcacagagggagtggtcgaaacaggaagaggtgtggtgggaggagtggttgaagcgggagcggttgtaggctgagtgcaacccttagtacaggtgacaacagacgtcagggtgatcgtgttagtcgcagtcacggggtgggtgtatgttgatgtgccacttgtgatagtactccatgtcactgatttcattagcaattgtaggatatcatggaacactagactcggtagccgggacagaggtctcagtagccgggacagtagtctcagtagctggaacactagactcggtagccgggacagaggtctcagtagccgggacagtagtctcagtagctggaacactagactcggtagccgggacagaggtctcagtagccgggacagtagtctcagtagctggaacactagactcggtagccgggacagaggtctcagtagccgggacagtagtctcagtagctggaacactagactcggtagccgggacagtagtcgcagtagccggaacactgctctcggtagccggaggaatcaccacgataggagttgtagaagcatcagtgcaagtggaaacagacgtcacggtgatcgtgttagtcgcagtcacggggtgggtgtatgttgatgtgccacttgtgatagtactccatgtcactgatttcattagcaattgtaggatatcannnnnnnngcaggcgtcacggtaatcgtgctcgtctgagtcacaggatgggtgtatgtcgacgtgccgcttgtgatagtactccatgtcactggttttattagcaattagaattgatagaataatcggaatgtcatttacctgggcaggtagtggtcgtgtaggtagtagtcacaataaccggagggggagtgccagtctcggtcacagagggagcagtctcagagggagcagttgtgggctgagtgcaacccttagtacaggtgacaacagacgtgacggtgatcgtgttagtcgctgtcacaggatggctgtacgttgacgtgccgcttgtaacggtactccaggtcactgattttattagcaattggaattgatagaacagtgggaacttcatttacctggacaggtggttgttgtgtaggtagtggtcacaataaccggagggggagtagtctcagagggagttgtaggagcgggagtagttgtaggctgagcgcaaccccctttagtgcaggtataaacagatgtcacagtgatcgtgctagtcgcagtcacgggatggctgtacgttgacgtgccgcttgtaacggtactccatgaatttattagcaattgtaggatatcacagtcggaatcttatttacctgggcaagtggtagtcgtgtaggtagtagtcacgataaccggaggaccaggggtttcggtctcagagggagcagtctcagagggaatgctagaagcaggagcggttgtaggctgagtgcaacccttggtacaggtgatagcagacgtcacggtaatcgtgctcgtctgagtcacaggatgggtgtatgtcgacgtgccgcttgtgatagtactccatgtcactggttttattagcaattagaattgatagaataatcggaatgtcatttacctgggcaggtagtggtcgtgtaggtagtagtcacaataaccggagggggagtgccagtctcggtcacagagggagcagtctcagagggagcagttgtgggctgagtgcaacccttagtacaggtgacaacagacgtgacggtgatcgtgttagtcgctgtcacaggatggctgtacgttgacgtgccgcttgtaacggtactccaggtcactgattttattagcaattggaattgatagaacagtgggaacttcatttacctggacaggtggttgttgtgtaggtagtggtcacgacaactggaggaggagtaccagtctgataagaagtcgaggtaggagtcacggctggagtagtaggaaccaccactggaatagtagtcggaaccactggggaagtaggaatcacgactgaagtagttgtcggaatgactggggaactagtgggcgtctcggtctcggacgaggtagtctcggacgaggtggtctccacgggcggaggagtctcgacaggcgcaggagtagtggtctctactggaggaacactgctactgtgaccaccctgacctccgtggttaccccaccaagggccaccgccatggttaccactgccgccgcggacggcaatgcgaggctcaccaacatgtttgggagtaatgactacgccggacgccaaggtcgcggcgtagagcagaacgatcggaacgcctctcatcttgactggcaaacgaatgcttatgtgctgagatagatagggctgatatgctccttggaacgaaggacgacaggaaccgtagcgagagagttcctaaacaagcaatataaacaattgaaataattgaggacgaaggctgggagagattgagaacatggcaggcttatatgtagctcgggggtttggtttcctcggggccttaattcctgtccggttggctcactcgatagcttctgttcggttggccatgggctagtgtggaccacctggtaccccattgtattgggtgctcaaaacaggaagtcgaaaaaataaaagtggcgctcatattcgaaagccaaccagaacgggcatgaacaaccagtattcagcagtcgacccgcatattttccatatttccaacgaagaagatgtatgtaccggaacaggcccggttgactagacgaccaggtacaagggttaagccaatgagaacctgtcggggtctcagcgattggcgtgtagtttgccaaactcgaaaaagttgaaatatgacaaagtcaaagtgttcagagcccgatgagcggatcagccaatggactcggatgatgtaggttgtgtcttggcaatgcgggagatagctctgggatgtcccatcacggcatagagtacgtacctatatttggttagggtttgccagtttctgctgttcttgtcttttttttttgtctaatttccttgtcttgatacttcatgatatcaagtctagtagtagaatgtcttttatacacatcatgaaaccgagctatgaataactcttaagtttggcccaccccatatggcccagataaaagtgtggggaagcgaaacctcacgaataatagtgaaaattcaaactgggcatctatgtactttgtatagataaaacaagttctcacgaatcttagggctgtggggatcaaaatcggacagccggaaatgaatatcagtctagatttgggtcagggtctattattctagcccaggcggtgatcgcaaaatggtttgatcggtgtttattctgcgatagacatgcccctgacccaagtatctcgtaataggctgtcaaaagcccagcgcaggccaagtggaccgttgtgggacaggccctggcattttctccaacaaaacatgggaagttctgcggtggggacttttatggagacttggtgatgtcaacgtgttgtccttgtttttcctctttggctttcttttgtattctttttgttttctggtgaggaattaatttactggtattgatatgtgacgtatacatgtacatagtatgtaggactgccctattcttacagtatcataaggattctctacaatcccggtccagactattggatttttgaatttcaaattggactgatgacgccctcgatctttctttgccaaaagaagaattatggcgcgatatacggagaactttggagaatatactctgcccctgttactgtgcaatatactccggacactgcataggcactgcatattacttgcatagttacacgtagtcacacaacaaggggcgttagttgttcgagtccttccaaggtaactatattgtatgtacggagtacatacaatatagttacaattctttttgataaagaacgacagactcgaccacggttcggcaatgtgacgtggggctattaccaaggaacatatgtatatctctgagtacggcgtatccataatggaatatatgtcttaaactctccaccacaatctcggaaaagtatctcccaacaagtccccggccttctcaattgcggagagtgagattattatgaagaggctggtcgcattcccttgcaaccatgcatagtggcgcacatgtcatcggaacagataacgagggctacatggaaaatgtggggtgatacactgaaaaagtacaaagtgagcctgaagccaccaaatccttctatgtctttttttctgtggaacaaccttggaattacaaagtggtatcgtacactccgtactccgtaactatattggatctgcgtaacgggaggtaattatcgcccgaaaccggatacataccctgtcattctttcctttttttttgattgcgatgatatcaacatatggtgtagctcttatctagtcgtcatcatcgtccgagccactactccaccccgtctcgtagtactctcgaatctcgcctagtccatttaccaaagcctcacgctcatcgaccgagactagacgtgcggcacttgccgagatagtcttgatgctctgagctgtccgggtcgaggcggtcaatgcggtaaacacatttactccagtacctgtctcgggggtggggaacatgtcatgcgggaaactgtcaagaataggcatgcggagtggcgtgtggaacctattaatggtatagaatgtgagtcgcctggctgagacatggaaagttagtgcgtagaacaggaaacctacttttgcaacatcgactctgagttgtatctcctgatcttgcgacggtgcccaatgtccctgtcctcggtggactcgctgtccctttgcggttcgtctccgcgggtgacttggacttggttgaagacatgggcgccttttttgtactccccgtcataggcgaagtcaatgtcaaattcaatttcggcttgcgtcggcccgtcttcattggaggcttccttggtttgaccgtcattgattttcattttattaatggaggattgtaattcgaagatggtgtgcgtgccatcttccccagcgagagaggcctcgaaatgctgatatggccgcaatcgggaaggcagcgtgaccgtctcaatcgctgagactatcagggctgttttctgccattctgattggcgatcaacatggatatagccgggcagcttatgcggaacgtcgataattggagaatagagcgatgccagttgcgagatcgaatgaagtgacctggccttgttcgtatccttcttgaactggtggtgctttataaagttcgaaacttagccaaccggactcgcgattcttcaaaatagcactgtatgactcacccgctgtgtcttggtgccgtcctcaatagcccacacccaaatacttttctttccaaattcatctctcagtcgttccatatactgggctgcgaatccgccccaagcatcatcagatccggagaacagttgcagcgcccgcaagtgatcacattcttcaagcagaggtctcaggtcacggtccagcaggtcatgctccttatcaaggtctttgaatagttcttccccgacattccaatcctcaaagggcatgttctgggagtttaggtcatattcgtttagctggacaatagaccttggatgatagaacactcggttgtagtctgaccagtagcgtacggattccgaggtcaggcgagggggttgagtgcccagatccaagcttttctgatattcacttggttgaattggaggttgcttttggactatctcttgtccatccctgccagacgttagtttgaaaaacttgttcatcaatttaacttgcataccataatccttgacctgctgtggagtcttcacttagctcgtaaagtgcattgtaccggcgcaatgttccaaatccgcccttcagatcatagattactgtgcgtggggtgtaggtttcggagccatctactccaacacccggtcggaaatgaacatcgtgatcaacatctgactgttctccatcataggtaaagtatgattcctagatatatatcagactgaagttcatatgtgatcgtggttgacagtacctgcaggttccaaaaatgtgttgctagataattagcccgctgaccaagctgaagtgtaacgatttcatgcatattgatggacacaattgacacttgcagtgtagcccctcggtgaattttgatatcgacaatgcccgccaaagacgcacagacataaccaaaacatgacgctaggccggatgtggggagtaccgcacgtgagtgactaaccacatccgggaaggtgctgaaaagtcaccagggcaacagtcacatgatccttccaaagagggaaataaacatgtttctgtgtgcgtcaccactttaactccacaacggtgattttccctcgtgaatctcgttatttctgtgatgattctttgaccctgtgatcatcctcggctggatccactacttgtcaagcatctgcgatggagtccccaacacgtcccatcctgagcccctcgaaggcgttgaatccggtctcaccggaacgcatgaatcaacaaaccatccccccctctccctcactaccctctgatctcctcacattacaccacaagaggactagaggtgtttcggaagtccaagccaaagtggcatttctcaacggcctttctcgaggagggaacactgccaactctgcatcgaacaatgccgctctacaacgcgctatgctgggccgcgaggaagccgagtccgccctaaccaccgcacaagaagatttatccgaagcacaaacacgagaacgccggatcagtgaacgcctggaatcattgttggaagagctacatggtacgaaagaacgccaggcccacgaacgatcaattttcgaaaaagaaatcagaaaagcccgcaaagaagcctttcgggctggttcaaccttggtaaaacttcaagaagaattgaaacactcgaaatcagacatcagagccctgaaggaggagctgggagcagaacgcgaggcaaaggacaaggccaagcaggaggcattcgaacgcgcctatgctcttgctggtcttacagaggaactcgaagtcctgaaagagaaattccgtgccctcgaaacagacaaccactcgagcaccctggaagtccgcgcgcatgagattcggagagaaaacttcggaagactgtcaatagcagaaggcgatctcgcgtttttggccaccccgcgcagagcgaaacgagccgctacaggatctgtcctatccccagctccggcacgcgaagaagaccacgcagaagccactccccccaaacgcccacgtttgtcggattgtgcaccaaaagcggagagtgaaaaagttacatccgagaaggctgctgaactagacgaggatatgttggaggagattagggaagagctaatcttcgagcgtcgtcgcagagtcgcagcggaagatatggtgcatttcttgaacattgagtgccagttcgaacgctgctcttgcaggcttgcagagagccaaggtcgtcgctacatttacgatgctgagtactataacaaattccaaaagcctcagatcgaggcggaagcaaaagctcgtgctgaacaagccagcattcagaaagctagtgtgcaccaagtccttcctcatccagcaagcactcccgaggctagccctccccctcctccacctcccgttcaccgatcacctgttcaccaggccaccactcaggtgagatctcctcaacatagcgttcaccaggaagaaacagagtcaagtcgtactccttcagccgcgccacctgttcctgtgcaccagcacaccgcgcctaccatgaaggctgaacctacggatctccccaagatgcagatgccagaggagcccctggttacattttctccagtgactggcacattcacggcattcccatctcctctccgagataatgtcagacctctgcgattggacttcttcgacaaacccgatcgagccgagcctcggccagatgtccacgcaggtcatgccgatgcctctgcatcacccgacttaggaatcgactcgttcaccccctctggggagcctgccccgaccagaatgccccgtcccaccccatcagatggtgccgccgaatgcccgcgtgtaccactgtctgtggaagcaagaccgtcgagacgtgtcgagagagagccctatggctaccgccagcccattaaccccccgaagagagctccttcccgacaagagccacagtcacagcgcacttcgcaccctggcgttcccgatacgcctatcgaccgcgaacaagcactcgcacagatcagggcgcgccgaggccgcacccatagcaagcagcgatcagtcagtgccagtgagcccggcctcgcagctcgcgcctcggcgggatccaacccgacttctgctcggggacctagacgtgttcctaaccccagtcttcgggctgattcgaggaccgagaaagaacttggcgaacgccgagatatgagtgctcctgttcggatgttccgacgttaatgaatgccatgggacgtatgtctcatgatgcatatttatgtctttcttttgcatagtctgccggtgcttgtcctttcctctaatacccccggcgctgcatcgatttgtgtttatttcatttgcgtgacgatcgaaagcaatatgctctgttttgtttgtgtttggatcttttagctccgatgtcatgagcctcagtatactatggatttaatttcccaactgcatgtccttcttttgatccactggcttcaagtgtccgtccctcttttcacatttcctatgtctcatttttcttcttttttacatagatttcgcttgggagtgaacttcatcttatcatggtcagtctggaatcaaatgaaccattaatcatccaccgatatatccatgaaaagatgtaactatattggcctacagtacataatctatgcctaacaacaaacaaatacctccatggagatctcaaagatctcaaagatagaacagtcgcggagagaaccagcctctacaaaaccgagatcccacaacatctaatcctcgcactatcaaccttcgcgccacgaccccaccacaaggaaaccaattcctcaacaaagactcggtccgtcacactccacacatcaagccccatctccgccatatccgccaccgtgatggtgacagtttcatgcgcaccggaatcccggtgaccagctctcgacccatgactcgcagacccgcccgcgctcgaccgctgccggagtaaaggggaattcccctcgtcgccatggatagactgccgagacatggagagcgaagcatcgataatatcatcatcatcgtcgatatacggcgcatcattataggcgtcaccgtcgaagtcgctatcatagcgcgcgatggcgccagccaacgtaacgaagatctgcgacgtcaggcggcggaagtacgcgaccagcgcaacttcgagcggctcctggccttcctggaggggattgcggggtgcgtcggagtgagagggtgggttgtagggtgggcgggcgatattctcgatgcttgccagaaggcgggagtcttgttctgcctgctgttcttcttcttcctctgagaggccctcgcggttctcgccggcggaggcccaccagatgaaggaggtgtaggcaaggcgggtccaggagactggctcgacgatcgggctgaaggagtaggctgagtctgtgtctgaggggtcttgttctggggatgtggggtggtcgttggagaattggcggagtccgcggcggagcattgagtagcggcgggcgtcgcgctgggttgcctttagctggatttgttggatttggttgggtttgccgcctgtgtgatggactagggagattttggggaaggctcgctcggcggtttgttgtgaatatggcgtggggagggtgatgaggacgtcgaagagatcgggtttcatggataagacagtatctgtggaacaggcgatccagcttgggtctgtttcaaggtctattatgctgcgcgacggatcgaaggaggagaggtaggggatatcatggatgccgacgttgaagaggggacgggggcgtagtggtggtatgcgatcgtcggggagtagctgtaggagggagttcggcaatgaggctaagagagatagatcatatactggatctgaattagcagcagctcaataacaatgcgcattggagcataccgtagttgcaagatctgtgtacaggagcctcgcccatgaagaggatccgcttgcgcagcaaagctgctctatagagggggaagatcaaaggtccgaagcactccgtgaactctggaagcgatgaagcggggtggaagggtgtcaaggccggcctgaacgtttctagtggcattgcatcgctgaaggcgcggttgcgactcgagtgatctagtcggtcgccgggtcggaaacgaagactaagaggcgagtcgaggggggagtcaggaattgaagaatcggtccctcctattctatacgtctcccaataatcagacagaaactgcgtatccgacatgttctcggcgtatttcctatcgaagaccattgtcagtcgggatctcccatcctgagtgcctggatatacgaacaacgccagttccttgagtcttggagcgtgtcgccaactcttcccaagtcttccggtgctgagaggcaccagaactccgatcgcaaacatcttcgcattgcgctcggcctccgtggcggggtgattgaggaacgcgctgataccggcatactgttcatgaacgaagtatctgaaggagcgcgtcagcaaagatcaaatccaaagctttcaaagacgttcaaaaacatacaccaggtcctcagtcacattgtgtaaccctgagggcagtgatttgtattcaacaaccccttccacctcaactgttcactcgggagtcagtatcgcgcatcagagcaactgcagccgcggctagataattggttgctcacctcccggcacagttcgcttccacgagaccacatatctgttgtcgcataatgtcagcgatagttcctgagcttgagagctgcgatgcccaggggaaggtgtagaaattacccggccctgatgtcgaagctgatgacgaacaaggcggcaatggctggtggcgactccatagaggaacgtgagacgtcaatgcccaaaggcccaggagattcagataccattctcaaggataatcatgggatgcgacgccattcaagcagtgtcggggaatcacggtaagttgaggggtgagcctggcaaaggggaccttggctattcgaagttagcgcctcaggcagcatctcgggatctagaagtcattgacttcggataaaccgaccattcacggtcttatgtggaaatgtaacccacagctgtgtcgtaagctgtggtctcggcgtcgttcggggatcgtctgtataggttgttgtggaattctaactccggttcttcttactcagatatatcccccgctcagctatctagaggaccaacgccaacatctaccaggcatcatatcaaagaaggcaactttttggattgcaaggaaaatgcgtttctttcattttctcctattatgagagatgcccagaggggcgggctattgattatactactccaatctcgagaaatgtgtctaccataccatatagatggcctccctatcccccacggggccccaccattacgcgttatcttcacggagacgcgccagtttctcctggtcaaagataccaggacccgtgagttcgttcttcaacgttgagatagaaggcacgaagaagtattctcctcctctttggataacccagctctctagcggcatgcgggcctcggtgggatatttgccatcaggaagaccgatagagcgaggcgggtgatggtctagtctctggcctacaaacgcatcaatgcccggaccatcaccaccgacgaagtgagtcttgcggtcagggaagtggtgattgcttgcccagcctaggagaatcaattgttagtggggggctctttgtcacacatgcatgagttcaagtttcgactgcttacgggtagtcaggaagttgaatccattgcggatatcgctctggtagcagacgaacagaagcccacgttccttttcctcagaggactttcggtcagtcatttcttcagccgagacttcctcgccatacggaatgccacgacggataataacagcatggtcgtgctccaagtcagcccgtggtctcattttgcgggtgtgtgccgcaaaggggcactttttgtgctcctcaacggggtggtaatcgaagttgtttgatgagaagagtttctcgtcagagtcatcatgaggagactcatccacgggggttccttgatattggtcagcaaatcgttgcgcgaacttcaaagattctaatttgcgacgaaccgttcttccatcttcccatcaagtatgcagcaagcttttcggctggcttggggtggtcttgagtaaaaggggcgtgcatagcgttttcctccatgaacctatagacttgatcaataccaaatagcatcaagttgttgaaggtcgcggaaaacaaggaaactgccatctttggcccatgctggttggcccatagggtcgccctcatgtccgcaaacaatcaatctgcatttcatcagtctgagagtccttcattcaacaacggcgagcacatttaccctgactttgtggccttgggctcctttcccacgggttgcctttcatcccagccctcaattacaggctgactgattccatccttgaatccgaaactgaatataaaggtaagtttggccggcaaagactcctgaggttgataagtacttactgctcttttcccttcatagcgcctgggcgaacctttccttctctgaccagtgtgaactctatagaagggttctggctgagtacatatgtatctgggttgagaggtactccctcctcggccaggaaatgttgcttcacctcgctgaccgtggtatccaaatcacgcttcaggcttgcggtcaccataatcacaccatcaatgagtctctcattatcatcggtgggcttgtattcctttcgaagctcctgggggttatcccacccctcgccgacaagatccgcatacatgcccttttcgaacaatccaccacggagttgttgcttccggaagactgttgatagttgcctgtcttttttgacgaaagtctgatcattggaattcacaaatgctccaagctatgagtggtggcttatcagtatttgttcaatctcagtgacaacagttggattgataacttactgcttcaagaccggtcgaggtaaaggcaatgttgattcccggtaaaccttgaagcttagctgatttttttgccagttcggcctccttctttgcccgcttgatggtctcacccatctcacaggcatcttgcccggtggtaatcttgggaataaatgtcttcagtcggttcttgaaatcaacttggtttcgaacgcgaaaaaagagaaagctttgaaacctttttgggagacccggcctgatgaaggtaagtattttgaaagaccatgccgatatgaatactcggtagcatggaaaactcaccaaacatctccttggatatttgccttgatggctgatgtgagactcatgatggaaggtcggactcctcaagagtatacgatctgatgtcaatgaagactacgaacgaacaagggttgacttgaggggacaggatttatatgagaaagacggtgggtacgccatcttctgacgcagcaagaattctatttttctaacaaaaaagcaaaggaaggaggcgggtctgtgattgaaccgtagcattcagttactggatcagatcgtccattagataggcatattcgacaccggtgttattaccgagggagttctaatagtagtgatcgatcatagccacattcagctatacgagcatctccgggggagaggggaagggcatacgcctagagatgcgaactcactgccccacaggtcattgctcgaatgtatgtattcctaattcacagatgattatagggtttcgtttcctcgatgctagagatcaacatggcccacttcccagttacatttgagtgtgggtccctccaagcaaatgagatggcatattttagaatatcacgaacatcacggttcctgggggcttgtgcggagtactccgtgctccatacatataacacattgactgcagtagtggagattgcagaatatccatatccggcaatgtaggatgtacatcgttcagatctctaggcttcagccgtgatccacctagctgaattcgaataccgttcatgtcgaccgaaaattttagtcaatcaaaagatatgctacaagtcatgactgtcgatttttcgggtatgaatgtaacatgataactatgtagggcgctgctgacccaacagcttgaaaatggaaaatcatgaagttaaaggaatgtggggatagctttcagctttccacttgacaaattgtggactcatattgtaatagctcgaggaacgacatatgcagcttacatctgcaagaagctagtgcataggccggtgtaatacccagagagactcagctgaactaaacttccacctttgatgtcacgagaagtcctcgggagctgattcgctgaagattagtctcagcggaagcgggccgggctccaccggaattgccgctagcacgaactttctccggagacaacattgacgttcctctctcatgatcgacatgcagtaaaattacactcgatcagagccaattggtcaatcagagccatgacgacaagttctgggtgcaaccttggaagctccacctataatatgcaagctaggaataacctcacacctgggaacagctgaacttgtacctatccagttcggggtgggcttgcatgccgtgtcttctgcaggatgcgccgatctttgactctgcccgagcatcgccgatcgggtctaatttttggggattttcttcaccgatctaagaaggagtgcccactcacgccgtactacgcaaggtggacctagacaatcattgacgtctatctctcatgctgatcttcagcaatgccgagatagacacttgactggtggcaagcagccccacatttcctctatgagatcgggcttattgtcatagtttgcgtaatattggcataggtcactccgtgctgaaaatcacttagatcctgaatgacagcatggatccagccctggcggagtattccgagtactgcacttatatgtacccttgatcacgtcaagatttctttttgcacagatgaagtgagccttactttcctcttctccttgacattctcttcacactccgataaatttcgcccaatatgaaacttcagtgggccgggctcctcttcggggcttccattgggggagtcaatggcatggccgaatacatgcacgaagctatgagaggagagcgtgtctctggctatggaaaacccgacaacccctcctgggtaccgcagttcaaagatgaatctcctccgtatcaaggccaccgaatctcccgtcaagactggaccgtgatatgtagcagctctgctagcggctacccatgcaaacatgcgatcgatggcaagaacggtacctcctggcacagtgacccctccgaaaagggacatactttcgttgttgatctcggtgcatggtaccaagtgggcgccgtcgttgtccttcctccaattgatacggacacggaaggcctcattacccagcacaagatatgggtcagcgaagatcacgagagctggacggggcctgttgcgtatggaatgtggcccaacacaaacagacagcgaatgtctgcgtttgaaccatcatctacccgatacttgagaatcacgaccgatgccgacaaggaaaacccctgggtcggtatcgctgaactgaacatctatggaactctgtacaccattcctcgtgaccctgcgctgggtgtctggggaccaactcttgatttccctattgtgcctgtcgccggtgctcaggagggatctggcatgcttgccctttggtcgtcatgggccgatgaccagttccactctacgccgggaggtaaaactgttatgactcggtggaacccgttgaccggcgaggtctctaagcgcactgtcagcaacacccaccacgatatgttctgccccggcatttcttatgacggcactggcatgatggtcgtgactggtggcaacgatgcctccgagactagtctctatgattctgccaaagatgaatgggtccgcgcaaccgaaatgaaactccgtcgtggataccaggcgtctacaaccctctccgatgggcgtgtcttcgtcattggcggttcgtgggctggaggttccaacgttgacaaggatggcgaagtttacgaccctgctacccgaaactggactatgctccctgaagccaaagtcagcaagatgttgactggggatatggaaggtccatggcgagcggacaaccatggctggctcttcggctggaagaatctgagtatcttccaagccgggcctagcaaacagatgaattggtactccgctcacgataatggtagtgtgaaggcggcaggggatcgtatggatgatgatgattctatgtccggtaacgcaatcatgttcgatgccgtgaagggaaagattctcactctcggtggctctccggactatgataaatcgtggtccaccaacgccgcccacattatcacgatcggtgaaccgggtgaggagccaaaggttgaaccagctggaaacggcactatgcactacgagcgtgtgttccacactacggtcgttctccccgatggaaaagtcgccatctttggcggtcagcagtacggcgttgcatttaatgaggaacgtgtccaatttattccggaaatctatgaccctgaaaccaacactttcacaaagttacagcagaacaatgttgtgagagtgtatcataccgtgtcaatcctccttccagatgctcgagtgttgaatgcaggtggtgggctctgtggcaattgctcagccaaccactatgatggtcagatctttactcctccctacctcctttctccttcaggtcagccccggccgcgtcctgagatcctctcgggcctgccagatcataccttggtgggcagtaccttgcgtttcaaaacctccggtcgtatctccacagcttccctgatccgtctgggaaccgccacccatactgtcaacactgatcaacgccgcattccacttgatgttactgctacatcatttttcaggaatacctggaaaactaccctgccagaagattcgggtattttaattcctggatactggatgttgtttgttctggaccggcatggtgtgcctagcatcggcaagatcatgatgattggcttggatgacacgaagaccatccagcctgcgcaggatccgctaagcgtgatggaggaacagaacagtaagcatcaatcactccgaactttttgaaatcttggagactaacactgattttacagacattgggacattcatgaggatcgagttgctgagaagaaagtggttttgaggcaagctggcatttttgaagagtccgaaggttgacatagcgtcagcattagttgcagtaattatagtgcatagcagcttcgtatacctataagagttgaatttgaaaagtcaccttgaatactactgctttacatagagaggaagtagtaggatgccagtctaccaatatattgatattgcccttcgtaccgctgcgctgtcctcgactgtcgcatacagataaggatactagtccatagacatctaccaaacgtggcgaaggaattagaacacgtaaatgctatgtagggaacctctattataatcctaaccaataatattcatactccttgtaagaagcgcgattgccatagagtatagctcaaaaagtccaagggtatccaccttacatatgaaaatcgtctcaagttgagtttatactaattatgtcgggataatggagctatcctttccccttgtaacgatatatagcatcaaaatgggtatatcaaagatgctgcctggtcttgactggatcagaagggatactatcaccatccccaggccttcgatcctcataagatatcgtcacctcgttgacttgatagataccagtcgaatgaggacgtggatgaggcagaatatgtctcgtgtctgtgtcttctccgtgctcttcattcctcccactgctcccagactcatcgtcaagatctttgccatgcacggtagtcgttgtcactgtatccatagcaaaggtcggttgttttacgctgcgtccggcgctgctttttccgtagggaggaaggtcggtgtagtttgaggcgtcgttggatgagatgtcgccgcaaatggagcgccagagagggcgaagggctggaatgctgacacaaaggatggtggtggaaagttcagacatggtccatatcaccgagtcggttgtcgcatctattctgtgattagcttgttttcgccgctaacagacaatggattccgaaactcacagagatagtcggatgattgtgttagagcgttgagacctgttgttcggattataccgcaaattccggcgctgtgaatatgtgttagtatgataaaatggaaaggcaatggatcagtagccgaagaactaacaaaatacccagactcaacgagaaacaaatcgtgtatttctcctttttcttcatgttcaaattccacaaggccaaccatgggaagagagcgagaacaaagtcaaggacggcggaccatgctagaaatatgttagaacaactcaagtgtaggttatgcttggaaagagaagaaagcataccgcacatgattgtggccatgaccgcgagattcaaagaacagcctttactcggaattcgcgggtcccagatcgactccactggtgtacattgtgcgaacacagtaacagccaggataatgctaagaaccatgatactgacgatccaaaaccagaggaagagtttgtgcctaggattaatcagtcaaggtcctcgaacttccagtttaaggaacgtaccattttttgacgacaatccgcatgaggaacgcagcgacagcgcacttgctcaaacccatgctaattgctataatactttgcccagccaagagcagtaacattccgtgggtagtctgatcgacagaaagttcgcctgaatgcacacccatgccataatgcgccgctgctgtacagagggctgtaaaggcaaccatcaaaatctacaagccgacatgacaagttagcaaatcagtgcaagagctatggatgtctcagaagagctcatacccaagaagcgagaagcagtagatcatcccaaccagtattgcggcggatcacagtccgtgtgtagactcgcagtgcaagcacaagcatacacaaagtagtttcaaaccaaagtactccaaccaacgttggacccttaccacggagagcaggcatgttggatgtggagtcaagattcaggaagcagacacaatgacatccatcattactctgttaaatataatcgagccaccagagggaaatagtaaccagaataataggggcccggctaatgatctctaattatgatctattgtgattgcgatgatcgtaatccacttccagctaggcctaacggctgaccatacttcgtacctttgaagctttaaaggtctgaaactaaaaagaaaagaattaaaaattcgtcacggacaataacaaggaaatcgtttccagtggtatggtacgatggattagttaagataaccatactggcgggaatagctcgctcgattttattcttcagcttgaatagatgattcttttcagctctgggtgtctctatttctgcctttttgccctgtagttctatgcaattcgacgtcttcattcctacacatctctctcaacgtttatcctcgtcacattttggattgctgcaatgcaataaaaacatttcaaattctttttgaatatcgttccggagcccatccgcactagtgacagggggcgagttgaacgatatatcacacaatacctttgtggatgtcaagtggatatgtacgataatttgtagggttgcaattggttcggccctagcggaaaagaagcatcgtgcttctcctagtctggtggtggtcatagcccatccacgaggcgacctttcccgcgttttaggtgtatgtgcaagccagatcatgcactgaaatagagtgggtcagggcatcgcattcgcatacaagtcttcttatcgggaagattccgagtgatttgcggtttgattaacagttgacagctgggtgccgtgggtaactttcttgacatctacctagtaaggaaaggaacgctgttgccatatgaataacggcatgtcaaacgaaaatttaaattaaagtggagggtcaattaacgaatcatctataactcagccgtcttcgtaagttgtaggtggttccagttgacggggtcttatgcgggtatccactatacctccgtgaagtctcagatttggggaggtcagttggagtactccgtttgtttaacggagtactccatacatatcatatacaatcgaattagcgtattcatttgatatacaacataagttgaagaccctcctttgctgctcgtgacctgcctgagattgtaggtgtaccttcctaattgggttccgcttcttggcaactgctcgggcctaccgctttccccaccgccttatactgtacggagtaataggtcggacaacaggtgcccgcactttatatgtaagccgctagcgaaaatatctactccggagttagttctcccttaagtgctccaccaactattccttcagaacaggaatcgccacgagtagacgaggattacgacacaacaagctttagaagttagtatgagccatttttatactcaaaattcaggcttaaagcttaatcagagtggcagaatacatgggcaaagggaaggagagttataatttggaaggcacccccgaggtccgtatctcgtattgtaatttatttcaatgggcgtaataaacacattttattagttttaacaataaaagtcaatcacttccgccggctctgattggtccaaaaatcattatgaatcctggctgagcgtccacgtctgggtcggtacggggtggatcggcagggccatgccgccttgggcaagccgcgacccgtccgaaaggttgagctccacttcttcgtataggtctcagaatatcccgtaaaagaaaaaagtacgtgatagcgggattggctgagattagagaagacgtggcaaatgatgatatcgaattaaatttgtatagctatatcagcaatagaaagttgaactatgcgaacggaaagcaatataatccacgtatatacacctcaattgatgcatcagtcctggatgtgaccattttctgcttagactgtgccgttcgagctagtgtcctcaacatcaagtgcatcctgaagctccatctcgacgtggtcgccgaacttagcattgatctcctcgagactcagtcccatggtctgcaggggaaaaaaggttagattggagtataacggtgcagggacggaaatcataacatacctcggggaaataaaacatgatggcaatagtgcttgcgacggtaacagcaacaaacaccatatagaacttccatccgatattgttgagagccagtgtgacaggcgcgctgtatgcgacagcattaccgaagaaactgaccaatgcaatggttgctccctcgctgcgcaggtgggtcggccaaatttcggaaccatagacgtatgcggtacattcaatggtggaggtgaagaaggcaccgaagatgaaataaatagcgacggcgccgttgattccaggtgtgtaggttgtgtggaggtagtacttctcgagagcggccatgacactgataatagcggcagagccaaatccaccgatgactgtgaatgtggttagtataagcagctcaacggcaaaggaatccaaaactcacccaacaacttgactcgtccaatcttgtctaggaggaagatattgattccgcaaccaatcaccgcacacacagtccaaacaattccaagtccaagttgcatggtggtaccaaagcccagtgcacccatgagggtaggaatcaaattggcgatggcagtgatgccggttccctggcccatggtccacaacaggatggcgcagagagcgcgcttgcggtgagacgctgtgcggataatgtagagatatccgcttggagtattcttctctgcaacgacctgggccttgatctggaccgcctcagcatgagcaaaagtacctctagggtcccgcttggtacgatgcagatactccaagaccttcttagcctcttcatcacgtccctgttgcatgagccagcgaggagattcagggatgaagcaaagtgtcgccatgtagataacacccacagcagtcagaacgatgaagataaaccgccactgcatctgagtgttgacgaagctgaaggccagcgcgcaaatagcggccaggatatacgccgtcactgttcccacaccgtgcagaccgaccagcattccacgtgtgtgcgggggcgagatctcactcatgtacacgggcgtattcgagaataccatacccgcaccgacgccgcagatgacacgcacgacgataaacatggtggcactgaccgaaccggcctgcaaagcacccgtgataatgacgatcagggcggcaacggcgttggcaattcggcggccgaacttgttagacacgggtgcctgcagaatagcaccgactagggcgcctccgaggaaactagcaagatatttttagctaaagatgcgtttgcctgcagtgaaggttgaacataccctccaagcataccatcttgtacagatgttgcattagaccccgacaagaacttggcgatgaaggttggttgggcgagggatccagcaagagcgttggccgcgaagccgtataggaatcctcctaaacatgcagtgcaagcaacctattgagtcagacaaggattaaagtaactaaggagagctagtcaagtaccaagatattgacgagactggtctcgtgtctatttccatccttgacactttgcgtgcgtgcgacaggtgcactcttctcagggtcatgagttgaactttgagtatcgctcattttgactgttggagtgagactggcaacaggaaaggacgatgcaaaaagagaagccgacaaagtgaactaagagagggactcaagagactttcagtaccccgggaactccccctattcaagtcttagcaagtgttattgtggctggcacactccattcgcaagtgttttgcttaatcttcggcatatgtacttgaggaaaagcgggtcctggccgacttgttccggaacttggctggacctagccctaggtactttggatagaagggataccagtggctggtatagacggtaattattgccagggttaagacgatccttccacgtgggtttcactacatagcattgcgtacaacatacgattatcaaagttgcttgcgtcccaccatcacgaggaatgtactccgcacggagtacaccgtacatagcctgagtttgagggcggagttaattgttactatccaccgtgagatcggcatctagatctgctaagataggaacagggcggcagaagaaaatgcgtttgctgcgtatgtggattaaatgccgtactccgtgcatgaatcgtacttagtggtttttaattgcattggtcttaaagaagagtcatgtaggacgatcagcgtcagctatggcttgacggtctcgaactaacccgcgctaacttgacattggcgtttttagcaaagtcggggcgttcggaaagtgggggggggcattccatggtctggctttttggcttatttttgcttttttcgttttcatgtcgaaacgattacagggatgtctgattcgccagtggatagagttcatggaatgtacccactcaacgttgttagcacattaacggtcctcccaaggaggggcagatgttagtctgtgcagacgggccgaatggtcccagatcaggggcacaatgccgagcaacaaatgcaatagattatcaaacataaaatccgacctggccacactaaaccgaaacaaagccattgttttgccccctattcttcacatacccatatcctattgtcaagccgatcatctgcacaatggatgtcccggaagcgcctatctttcccctccttgaaggcaaggttgccatcatcacaggaggcgcccaaggcatgggcaaggctaccgcgtctgtgttcctccgggcaggggccaaggtagtcattgccgatctgaaggaagagcaaggagctcaggttgcagaagagctttcctctctgggagaagtccgttttgtgaagaccgacatctccaagtcagaggatgtacaaaacctcattaaggagaccgtcagcgcattcggcaaattggacgtggcgatcaacaacgcagccatgactcccgatcagactcccctgatcggtttcgacgagtcatattggcgcagattggttgatatcaatttgaccggtaccgcgctgtgctgtaaatatcagatgcagcaaatggaaaagcagggcacaaagggctcgattgtcaatattgcttcaatcaatgcctattcaccgcagccaaatatgccagcatacacggcaactaagcatgcactcctgggcttgaccaagcatgcagcgactgaaggtggcccgaagggtatccgagttaacgccattgcgcctggagcgatcttcgtatgttttccccacctttaatccagggaggttctaacaatagcagagtgatatgtcggccgcagcgttggagattatgggcaccacccatgatgagtttgcgcccaaggttagcagcttgaacagattcggacaggcccatgaggtagcgcaggggtcgctttggcttgcatctgactgttcgtcgtacgtaaacggaatttgtattcccattgatggaggattcctggccaaatggtagttggtttttcatgcgctatgttgtacatattatcttgtgtgtggatgaacctgcagctcttcgcctaagggtggggtcaaccccctgtgacgctaattatattctcctcttatttcaacgtgaactctcttggtcaaaatgatcccggaagtcttagacaagatggaaacgcacgagagatggttaggtcgatacgggagcttagttcaaggcaatgacaaacattccatctacttttgttagtccagttacatggttgatagtggataacgctattggtctcccatcttgcggtcttgcattaggcaacgagacgactcgaactactctccgaaatgctagagatgaagacatttcgttcatgcgaaacacgttcagttagatggaacaaatcacacgtgttcttttgcttgaacaaggtcgaggctcatttggaccgtatgtttccttgttcaaccgattgcaacaacgtaagatgccggactgtttgtctactcggccgtgtctaggccatcacaccacgatcaacattcagagtcctagaggaaagatgtcattcattccagaggaaaaccgagagatgcagtttaccgaggcggtgattgtaaatgcattgagaatgctcaactacaaagaagccatattgaaacctatcaatcgacactgcttgacgaataagccagatactatttggaactgttcatcacgataatttagagacgaaatgacaaagcttctgttgcagcacactgcaactgggcaaatcatttgtaatcgagacatatgttgtaactgttcaagaaaaccaagatttccagatcaagttcataatggccgatagacgcattgcccaatggacgctgtattgaagatatcccgtgccagaactgagtccgcgagttgtgacttgcgactttgaaatctacagtgcatttgagcttttctcaattagataacaggaagatatgctgttgactttacgtttatggtagactgctgtattccaaggttcaccgacctgggaaccttggaaccttccttgtatcggcccacgcggatgcctccctatgttgtacgcaaatttcaactcctggtgttatctctttgatacgagacgttgaaagctaaatttgacccacaactgtcagttgaagttgaagttcaaaattagatactcgataagaagttgatactgtgttagtagattctttctgctgacatctagatatataaatcaattcaaatttaaagtccattgaaaccgtttgaacgaatataataagaaattcaatgccttgctcgcgacagcatattgatgctctagactccagggtttccagccaattgtggatatatcttccttttagtttcaatttcgtggatccgcagctgcgcttcctttttgactagctagttcagcgcacatacaacggcacggtttatgcgctagtatccacatatcaggcgacttttatacataaagtatatactccgtatacctgccgactattggagtcaaatttatgggtgactacaaaatgaggttgtggggcgagggcgataaacgggtcatagaacggtttcatatgtagcaatatatcgtactccgcactccgtactttgttcacatcttcgtattaagtggaaataacctatcatatattgagcttgtggacaagccaatgatatggctgaccagtttcattaatactgagccatttttcataaatagacgtgtccaggttgtcttcatcccgagccaagtccgtgatctttgctcagttatatcaccgtcaacatgggtagtattcaaggcccattccctcgcatatacgagggcaaactcgctctcgtaacaggatccgcacgtagtaagtccgaaagagactcatttggcatccaatactcatcatcttccaggcattggagctgctatagtcgagaacctggccagcaagggctgcaatgtgatcatcaactatgcgaccgagggctccgacgagtccgcagcagtactcgccaccaaactccaaaaggaatactcagtgcgcgctctgcccattcgagcagacattacctcgcgggaggaatgcgcacgaattgtatccagcgcaaaagaacatttcaccaactcggaaacaggatctttccaaatcgacatcatcgttcacaacgccgcggtgttataccttggcccattggaatcggtcaaagaatccgaattccgtcgaatctatgaagtgaatgttcttgggccacttttacttaccggtgcctgcaaggagtatcttcccaccgatcgctcggggcgtattgtgatgctatcgagtattgcatcgaagacggggacggagaacacttcgctttactcgggcaccaagggcgccattgaggccatgacacgtgtgtggtgtcgtgagctggccgagagagccaccgtcaactcaatcaaccctggtccggtcatgacggatatgtatatgtctgcacctgatgaggtcaaggaggggcttgcgcattggaatcctctcacgccgttggtggctgttcgggatactgatagcccggaggtgcaggagttgggtaggaagtttggaggaagagcggcgtatgcggaggagattgctgggttgattgccacgatctgtaatccggagtttgggtggtgtactggaagtgtcatttctgcaaatggagggttgtcctttagtacctaagtatagttaattttgctaatatgaactctgtgactttttaggccttcaagttagaaggtagttggcttattctgtatccaaacactgcagccctggaggtgggcgaatataatgtctcaggcaccaattactgcctgaggtttgaagaaatcggtgcctgaggcaaaaattcacccgaggacggtgctcaaagagaaacacaagatgcaagcatttcaagcttgttctttattcttgctcgatcaatttgacttctgatgatcttctcttctcaatttgagcctttatttgtcggtgaaattaagcttgttattggccaaactcaaatccacctcttcgcaaaaaaaagccaagcaaacattcctcgacgtctcattttccattcgacttttctacactttcctatataagtgtcttcggacatcgggatataacagtctagatcagggtcaacaccccgaggggtactgcaaaaatgcccagtcctccatctcatccatattaccccttggatgccgatgttgtgggttatcagcccaaccagaccccggtgatggagcttctcgtctctgctggtggggcctgtactgtccttcttggtgtgactttcgcattggccagatatgtgaaacccacactgcgcgtggcggatcgaatcgccatcctgtggtttgtgctctgtaaggcgccaagataaatatcagcttggaggttgaacactgacaatggggatctatagctggaactctgcactgcttcttcgagggttattttatgatccatcatgcccacatggcttctgcccaagatctctttgggcaactatggaaagaatacgctctgtcggattcccggtatatgacttcggacacattggtgttatgtatggagaccatgaccgtggtgagtcccacagctatatacaacgccgacgctaggattcaccgctgattcccaccaagctcctgtggggaccactgtgctttgttgttgcatacttgaccgtaatcggccattccctgcgccaccccatccaggtaattgtgtgcatgagccatctgtacggcgacatgctatattatgcgaccagtttgtttgacgagtatgtccacgggcgaccatattcccgaccggagccgtattatttttggctatattacttcctcatgaacttcatctggattgtggtcccagcgtgtatgccctacagtccccgggatgtctgttataggctgacttggttaatagactatctctaccaaagtatctccacaatctcggccgcacttaaacgccagtcggaaaaggacaagactaactaggtaagacttctttcgtcataactggtatagtggcgggtcgtagtggagcattgggctagaattgtgttggcacgaagtactcagagaatttggtgttgagcttgaggagatacaagggttcgaggggggaaattggtcaatgtatagtacctaggatcatatgatagccttatacccatgattaatcgaggctgtctcctatgaatctattcatgtttcgagcttgaacaggtttaatagatatctccaaccacactaagtgccctatgacgctgatgtacaaggggcgccacccgacgcgcaaccggcgttattaaccaatattagctgccctatctccctagaagaaatttctctctaattttgaggtcaggatcatctttaataaagactcagcaggtcaaatcacgagggaaacctccctttaatgagaagttgttcgcgccgatctggtttcccggcaaccgatttagtgcgggagggggaggcttatcgaacttgtcagccccaacctccaaagggtctgacgcatttgtttatgatccttgaaggattttcctgagatcgtccaaaaaagcaaatgctccaaatttgttaaagacctttgggggctttggtaagtaccaactattgtgacagtcgaagtcaacaaactccgtgttttccgggtatctgctttgacaacaaaacttcgagagagctccctactaagtcttggcttctgcgttgccgtgtaggtaccgatgccatctcctgcgacgtcacaacgtccctccaatcgtggaggaactgcgaaatccgccaaaccgctggacatcggagagccgctaggggtgcacgacacgaacacggtgcgctctagagtgcgaaaatggcagcaacaaggcggcggggtcgttacagtcgacgacccctatgccgatgacggggaaaatgatgcgaagccgaaaccaaagcctgccaaagtcaagatcgagaaactggagaagctggagaagctggcgaaggtagagaagccgaacaaacccccgaccacaaggaagcgcagtcacagcacaccccgcaaacgggtggtgagcgatgagcattggaaacgaacgagaagtcgagcctcgacccagtcctcgtcgcgcaacctgcgcaatctgcccgcacctaagcgcatagccgaatacaccacaaatgaagggcagcttaggtctccacgggggaagcacgacgatagtgacgatgagaaaaaaggtcgcggtccttctaaacccctaattcgagacaccaagtccgcgggcgcacgacagagtatcgacaccatcacggagagcgactatgagacagaccatcctagatctgtggaaccttcggagctctcggacagattcaagacgcgctcgcctcctccagaggatgcgtgggcagcaagcgaggcggatttctctgagttgtcgaggagacgcaagcgcggcccagcaaaacctcccaaaggtggtatattcgcacacatgctcgacgagtccagaaaaatgtttgggattcctgaacccgaaccgccgagacctacacctacgccgactacgggccgtggagccaaaatcgaggcatggctttctgacacaccggatccttttctggatgaagtcgtttctaaaaatgatatgccagctcctctggatctgaagtcaggccgagcaaggcgatctcaaaaacttgctgacggggactcacagcctcctggtaccgagtctgaaccgtcaacaatcagcgagcgccggaagagcaccgatcatccgaagagcactgagtactcgaagagcttcgatcaccataagagctccgatcgcccaaagagctccgattacccaaagagcgctataaataagcactccaagggaagggacagcttttcttcaatcgacaaaacacacaaggcacaagatcgtgagacggcctcagaatcgaaaagagctagtatagataggacttccaagtcatctgtcaagagcaaaggggataattctgtcgaagacaagctttatgaggatagtgctacaacctcggagtccgatttacaaccattctccgatggtggctctgaagtatcaggacttaacgcacctgtaccacttggccgtaagaagcccttcccggtcaccggtcatcatcgtttatcgacgattgcttctgcggaaaccttgagcaccactatcacagacataaccgagcacgtaccgaagtctgcccctatcgaaaaacttgaaataaaactcgaaccgaaactcgaaccgaaacctgaaccggaacttgaatcaaagcttgaatcaacacctgaatcgaaacatgaatcgaaacatgaatcaaaacttgaatcgaaacttgccgaggaagcagaaaaagcagaagaagcagagaaggatgaccagttcgatcccgactcgctacccgtggtatcctcgcaactaaaaagacggcttaccactcacaatgacctcatgtcggtactatccgtctcggcttcgcggagcagaagcatccggtcgaatcggagcattcgtactaacaaaagtcgcctggcccacgcgacagttgaggatctgctctatgaactgtcaggtgacgagacaaagtatatgcgcgagctaaaaacactggtcgggggtgtgattccggtcctcttaacttgcgtgctgtcccgctctgattcagccattgccgcaggcctatttcggccgtctctggaccctcaagatgacgtgaacttctcgaagccaattgttaacatgggagtggcgatcgagcgcctcaagaacctccacaagcgaatcccgcaggacaacgcggatgcattgcttacatgggcgcaaggtgcccagagagtctaccgcgagtacttgaaggcgtggcgtctcggattcaaggatgtcattgtaaatctggctcctcgggaagaagacgaagccacaaacgatgctgacacgaagagcctggatgagggcttggagcgagacgaaaatggcgactttgtagatagcgatggggaaaaggtcgatgtggcctatctactgaagcggccgttagtacgtctcaagtatctagcgaagagtttcaagggtatcaatattctggagccgtccccaaaggctgaagaaacggctaccgcctatcaaattcttgttgacgatgcccgaaaacgcgtccgagatgaaagagcgaggctggaagatgactctgctgcttgtatcgacccaacacgcacaagagacccaatgaccttgggtgtcctccgcgggatcggcattgaccagactcgccatgtccgtgctcgcgatttcttcaatctatctttgtatcattcaagtggtcaacttgtggattgtcgagccgagcttttatatcgagacaacccggcaagcaaagggcctggaggcgatcttttgatttgcgaaatcgatcattcagaccgctggcttctcttcccccctatggacctaagatgtgtttcagctcgcaaaggagactcgaaacatgaaatcgtgctcatgctgcgcagcgcccccgaagatgcaaccaagtactggcaagaattaatctcgctccgcattgacgaagaagaagtcgggtctgaatgggtctcattgctcggatctgaccctattccgccttcaatttgtcgaagccaaagcttcatcagccgagctaagcagaacaaggctcgcaagccctctgctgttgattctccgcccaggtcgaatgatattgacatccccatcggcgagaaggcgaccggtaaacgacgctcgtggacttcaaaagaccactcgtctgagccaagtacgatcagctctgttatcgatgcccggagctctttgtcctcaatcgtcactcgggagactgattacaccactgggggatccgagctgtctaagccagcccgccctgacttacctcttcttccttccacagctcccaggagctcgctaactagtcaggaaaggactctcgctggactcaaacgatccaaggcaaagagattttctcgccacagtgacagcccggcttcagatactgcctctcagcacactgtatctgagaaagcacccgaacacagcgcacctgcggttgccgctcctcaaacaccaagtacaccaacaggaggtagattctatggcgaaacggaggaatcctcagctataggatcaccgagagaaaaatcgcgttcgaggattcctcaaccccagaagacccctgtcagggaaccctcccctgaatctcctagggtttcatctgtgccttcagtaaatctcccgctgattcccaaaatccgaactcctagcagccaacctcatctttccactccgacacgcatggaccccgaagatgaggaagactatcctcccctcgaattcttgcccaggcaagaaattatggagacaccaacaaggactaggagaaggaagtcgcgaagacggccaaaggatgatgatagccctccacctcccccacctcatcgctcgcctagccctgcccatggcaagcgcgcaactcacccagttctcacccccactagtggtggactcaagcgacgtggctcttctcccctgaagcacgaatatgaaccctctacagcttcagattactcagagaccgactcggacgcgtcaacagtgcgccactattcctactcatcatctgaatactcaagatccaatggcttttctgactcggaggatgattactcctcggtatctgaagacgaagaatatgctactcccaagccaagagcacacgactcgattactgatgccagttctctctcgccttctaattctgtgtcgcagggtggctaccgtactgtgccgctgcagcccaccaagaccagcaaagccattgcgtctgtctttgcgtggtccgacaaaggcaactgggagcttttgttccctgacgagtgtaccatcgtcgttagtcctggcctgatcgaggccttcgcggtggactctgaacctgacgattcctcatcaccaagaccgctcatctctcttgaactgacaccgctcgttcctattcgccgtggcaccgccatcgacattagtatccgctctcctcccaccgagcgatcccaggtcacatccagcaacaacatcatgttccggtcatgcaaccctgacgaatgcgatgccctatatggtctaatcaaccaatcaagaatcaacaacccaacttacatcgcgcttcaaaacgctcgcggtccattcaacagccatgcctctaccttcgaacctgccccgaaagccggcggaggcctgtttggctggccccgccccagaaaaagnnnnnnnnnnnnnnnnnnnnnnnnnnnnnnnnnnnnnnnnnnnnnnnnnnnnnnnnnnnnnnnnnnnnnnnnnnnnnnnnnnnnnnnnnnnnnnnnnnnnnnnnnnnnnnnnnnnnnnnnnnnnnnnnnnnnnnnnnnnnnnnnnnnnnnnnnnnnnnnnnnnnnnnnnnnnnnnnnnnnnnnnnnnnnnnnnnnnnnnnnnnnnnnnnnnnnnnnnnnnnnnnnnnnnnnnnnnnnnnnnnnnnncccagccgcagaaaaagctatcgcgcatcgagctccccacgctctctagccgaaggatccgaaagcagcgtgggaaccatgagcagcgcattttccgccctcaaacgattcggaaacggcagcaaaatgttcaacattgcccgctcaaccatcgaatcccgcactggccgcgaaggcagcatctactctggctccggtgattccggcaacgacccatcccccaactcgggcttaggtcgcatcgccgcagcagtcaaaggcgccgacggtatcggtctctcaaacgccaaggtccgcctgtacgcacgcgaatctgcctccaagtggagtgacatgggcgctgcccgcctgaccatcatgcccgcaccacccaagaacccatcccgccccggtagtggtctcagcggcgacggcagctcaccgcacggtgacaacgcaagtggcgtttcgcctcccgcatcaggatccgcctccccgcgcggtgcgctctcgactgagaagcgcattgtcatccgcggcaagacacacggcgagactctcctcgacgtttgtctaggcgagagcgcctttgagcgcattgcccgcacgggcattgcggtatccatccgcgaggaggatgaagacgcgtccatcgcgaagcagggtggtgtcgcgactggctctggcaagatatttatgattcaaatgaagagtgaggctgaagcagcttatacctttgggcttgttggcaagctcaggtattgatgagtgatgtgatgagtttgatgtgttgggtttatgaacgagctatggacatgaggtatgggggtgcattgttggtttttttctctctttttgcttttccttttccttcttttcttctttatatttttgcctttcttcagtcattattagctctttttcttttgtacatttagaccgcagttgaatgatatcccggccgtggaataatgcaatcgtctctcatctttcttcaccttctattttacagtgacatgtcctcgatattgagccctttatgttgttacttcacatttatctctgtgtctcaaggtttaagtgcttctatatatgccattctactcttgtatatatactatagtccaaataatgaacatgtatcataatacatcatcctaaaggcaattcctgaactgcgagacacacagtagtctaactcctcatttccgccccattggtcttcttgaagacatacccaatcaaattacactcatccttcagcatagaaaccaacacatcatcatcaatggcagcttcaagctcctcatcttcagccccagcctcattagaatcggactcggctgcaagcagagatgggtcaatgtgcgagtactgagctaaagactggtgcatcttatctttgggactcttagtctcgctttctttgtctttcgtacttttctttcccttcctagctatcttggcacgatgagtgccgtcccggatagactgttcttgtttctccatatcgacctcagaagctttaacaagagtatgaggtttcggcagcgactcatccgaatcataaccatcatcaaagtcatcaaagtcagaaggaggatccgacaagtcctcaccctcagacccagcatcaacagtagcaggcgtcgcagccccagacgaagaagcctcaacgtcagccggaacaccccgtccaccacaccgacagcccagcaactcatgcgtctgacaagccctgtcctcgtcgagcctgaacaaatccctgagttcagcagccgagaactgcgcaccactattactggtgctcctctcctgcataacactatctgcaagaccaagcttggtaacctgtctctgccaaatcttctcctcgagactgcccttgagtagaacacggtagatgcgacaaggtcgtttctggccgtcgcggtgaatccgtgccatggcctggatatccgttgctgggttccagtctacatcgaagaggatgagacggctcgcaccaatcaggttgagacctgtcccgcctgctttcgcagatagcaggaaggcgaagcaggagcttgcggggagacggttgaaatcgtccaccaggccctgccgtttctgggcgggtgtgctgccatcgaggcggaggtaggggaggcctagggaggtgaggagggttgcgaggagagagagggttgaggtgtagtttgagacgaggacgattttctcgtctgttttgttgcgcattgtgtcgaggagttggtcaaggacgcggatttttgcgctcgaggagggggataagtggcgatggagaggttggggaatggaggcgatgagggcggtcattgtttcgttgggcgtgttattgttgtttttcgcggttaggagggaagggctgttgctgagctttttgaggattgttattagttgcagggcactttcagcgttgcccattgcggtttggaagatcggggaggcgaggactgctttgtagatgtttgcttgaggacgggttggtttgcagaagagaacgtattcggtctttggtggaaggtatttggccaggatgtctgctgttcggcggagcatgaatttggaggtgagttctcgcagctcttcgcctctggactctcccttctcgatttcctttcgcgttgcttcgggctgtctgctgcgaacaattggggtctcgaactctcgaatgaaggacttgaaagttcctaggatccctggattaacaaggtccacggctgcaaagaactctctcagatcattttgaattggcgtgccggagagaatcactctcttcacggcgctgagcgattggatcgctagaccactcttgttctgcaaggtcttgagcctatggccttcgtccgcgatgataatatcgactccagaaccattcgccaaagcttcctggaccgttctgagtttctcatatccaacaatcatgatactataagcccggcccttggtgaaatcagtcagacgcttactcttgtcgtcaaagacaaaaacgccaatgcgctcattgccgagccacttgcggaactccttccgccagttattgataagagtgacaggacacacaatcaatgccttcttaatgacaggcggggcttcaaagacaggattctgcttgagcagagtccaaagcagcgcaatagtttgcaaagtctttcccaagcccatgtcatctgcgagaatggcaccttcaccattaaacgaccgcatgcccatcacacactcatacaagaacttcacaccctcacgctgatgcggtcgcaagttcttggtcaagagaggatcaacaacaacatccacaacctgctttcccttcggcacagatttcggccgcggcataaccaacgcaccaaccgccttggggtcatgacgcggaacgaccttccccataaccttgggagcaaccgtattcacaagcagcggcgccttataagccgcaaatttcgcgggtgcagttccagggttcgcattagggtttgtaacgagagctagcgagcgcttgagggactgtgtccgctcagcagccgtaggtttgcgtacttcacccttctttcgggcggggagggcttctttcttgggtgtgggcacagggtccggcgtagaggtaggtgctgacttcgtggcttccaggaacactctgccggagaggtattccttgcgcgaaatctcggagtctatctcaatctctttgccggagatagacagtgttgttccgggctcgagacgggcttcgtgcaccttccgtcccatctccttcccggcaatgtctcgtagatacacaaactctccgcgggtagagagaattccgtctccgtcccatgttttgtgctttttggcgcttggtttgcgcctgtctgtgttagctggttcgctgtaactggtgctcaccagggatcaacgttccgaggacctaccagagaacattgaaatatctttcgtcggatgtatcatctttttcaccggatgatgactgtgttgtgctgtcagatcttcgattgttaacttgtaggagtggctttcgactgtctatcggtgattgcacatccttgggtgctggttcgtcttcgaggcggggctttttggtaggacgactgggctcgtcggggttgttggtggaggttgtagcggagttcctaactaaaggggacttgaagggtttgaagaccatgactgtgttggtcttttctccttccaagattaagatggcgttgggatgaggacgcgacaacaggcgcgggacgcgtggtcacgtgagctaatgatctttcgtgtgaaggactgggcttggaggaaaactcgacttaatttagattctagctattgataccgataagaaagtttgcatcttcaaaaaatgtgtttggacagtgaatatcaattatgcttttacagtagctatgtataaagtcgaaaaaaagtctaacacgaataaaaatatacataaggcggatataacgttaggtcgcatcatctagaaagagcattttatagctgtgcagcagaaaaaagctgtgccttgcaaaataaaaatggtatacgcaaaatagtcccccaaacatcccaccaagatttaccgagcatcgtcggccagggccttgtcggtcaacgggacatgcttcgggccctcgtaggagccctggtggacgaaccaccagacggtaacgaaaatagacagaccaccagtcatcagactggcatagttcatcgacgcggcatcagtaggcagagcgtaagggaagcagaagataatagcgaaggcgatgatgtagacacaggccagggagttgacgatgtagccaattgtgtcattcatgtggaagtatccaggcacgaaggaagaacggcgggtcaagatgtgagggaaaatggccatgaagtacgaaagactggacaactgcacgaagcatcccacgaaggcgctgaaggcggtagtcgagccgaggtagatgcacgccaggatggtgacgagaccggtgcagatcagggtggcgttgaaggggttcttgaacgtggggctgatgcgtccaacccatcccgagaatggagtggcgccatcacgagcaatagtccagagcgtacggccggcggtgatgtaacagccacaggcagtgataaaggtaggcaggtaagcgacgatcagaagacccagagcgccgccacgggagccggtggcttggcggtagatctcagccagggggaagaaggtggtcgagtcgcgcacctggtcgaggtcgttgatggaatagaagattgcaatcatatagcagataccagtgatgaaaccgacacccatctgggccaggatagccttggggatatttcgactcggcctggattcaagttagcgattatagatggaatgggaaagaagaacactgacttggggatttcctcagccaagtgagacgagcagtcaggggtgccaacactgtaagcaccgttgagcataccagcgacaaagacgaatccttgctgggcataaccggttccgttttcccaagttgcccacacgagcttatcggtggcatatgcagagccgttcacatgaggcatcacagcgcacacgatgatggtcacgaacacaccagcgagaatgaagaacaaacccaggtttccaatgtgaggtaggaagcggttcatgaacaacacaatagcgcaacaggcccaggtgttgaggaggaagctgataaagacgttccattgtgagggcacgaagctgggatgcatcaattgatacatagacacggtctgctgagccagaatcaaagacatggatgcggcaccgagaatccaagccaggcaattccaccatccagcgtagaatccacacacgcgaccgtacttactcccggcggtgatagttgcccaatggtagacaccactggctgagggcatacccgatgccaattcggcaatggatgcggcgaccagccagtagcagatagacacggctatgctaaacaaggggttagctttggttggttgaactggtttgggagagtggcatacaattcatagatagttcctgccaatccaccgttactcaatgccaccaccacactacctccttgggcaatccatgtgtttccggtggtcacggctaccgcacagatactgagaaggccaaagttccgctctagttcttggcgatggcccgaagcgttaaccaactctccgtccactggaccatcgtgggtgtaatccggtgtaggtgcgatttctttctcagggacgtggccgatctccttctccgtcgaataattgatctcattcccagacatgttggatatgtatatggtaggggatttccctaaaaccagacgaatgcgaggtccaaaatgtacagctcccgaattgaagaatgatatgggaagaatcgaggcgaacacggatgttaagtaaaagggagtcaaaggcgtacaacggtatattatcatgtcacggctaagccgatcaggtcgggtcggtcgacatccacgcattctaattcctcaatctctggccaatcagcattcgcggagtcacatcattcggtggccaacaggtccatagtggggtcgccccagagttcctattggcggagccggagacaagggtgtacaaatgcactcgaagcggaaacttttacaatcaacgccgctgcatggctgaattacgcttaacctagaaggggagcttcagcagaagggggattcccatcccccttagtgtccttttccgtgggttccatctctacttcttgcttttttggggtgattggggctctttggcggggtcaaaccccagactctgcttacttcttatcatcgctactctaaatagatgtctatctaggattcctagagataacaagaccagttatgcatgcttagcataagacataaggcgatggttggaacattccataatccatgcagatattccatgcagcgtacccacataccgtatacttagtatacactattagagatttttcggagatttcccctatttgagattgaaacatatgattttgcaagcgagacaagcgagacaagtgtacttgacaactacactacttgtaaactaaagtataaatgctttactagcccagacacatcaaaggatcaaagcgtcaagcaataggtaacactacgggtataactatgtgggcacaaacagtctctgctgtccatgcgacgggggtgtctcatataaggtagaaattcactcgagttcatcaattggaaaccatcggaggcaatctagactccgaatctctttgcctgggagcacagttgtactagtgcagctgaatgtgggttgcgcagataaggcgactccgattttagcctcagatctagtgggctagtctgatatatattaattaagtagctgctagttaactaacaaagtcttatgactaattaagtttactcaagtgaagtcactaactaactacggcgtagctacacgttaatgaattaatctagagtataatatattgtaaaccgtactgcagtgagattaataaagtctctccttccgaagttcccgaagtttcgaatcttcaaacttcacatcggttcattcaatcctctccaagttgcatgtacaacatatgttgtatcagcccgtctccataaaagatgaaaaaacatccgaatctgtccgtttcccccggggctgggcagttcccaaaatccctcagaaaaaaaggctcgggccaataggtgactggaccatggatggtcggtgatttccccactttttacagttgtggcggcaaactcagaatatctgatttcccgatctggcaggtattggccatttttaatgaattccagtgcaatgtgttaaatatagtcaaatctgccgatagtgacacgcagccggtatatccgaacaaactctctattctgacagttcttcagggcttactccgtatacaatgtatgagttatgtacatgaatactaattgacatggatattggctgatccctcagctcctccaccctccactgtgggccattcccccagatagaaagagccatgtctatcttcgcttaacgacgatgattggatataacaattatatgtagatgtgcttatgtctcccagttcagaaggtaggtaacaactaggttcagtatggatctctcaggaaaattcagcctaaatatcctcggttataaaggcctataaactgtaagacagctgaacttacaccttacatggaaattccctatgcaacggtaaagtggaccaatggcaaaattgttacaaatcagaatgcagcaatgaaagcaatttcccagactctcccgatccaaggaaccaccttgccatccaagcccccactatccaatggcggctatatgccctgtatcttgggttgattggcgttttatcctctgcatcttgccaaaccttgtaccttcaaggctatcattcagcatacttcgaaggttctaacgcgtttcctatctcgtcgtacaatcggcggcttatgcaggagctggaactctatacttaatattgcatatccccgctactctcataaaatgtgagcgcgcctctcgactctcgtttcactccaagatctcgttaacctctattcgaaaaggccagcggtaatgtctggcttaggaggccacttcgccttggaattcgcccatgagacatgggctctgtatgctgtcggcgtactgggtgccgtcttgcgatggtacgatagtaattgaacatcctactatatacaacactgacaaagatcctcgacagggtggctcgttttcgacgcttaggcattcgcaatctccagaccgacgactatcttatgctcttctcggtagtctggtatacaatactatgtgtcgccttaaatcaagtcgcctccggtggggggtcaaatctcatgaccgaggaggacaggaaatcgttaacggataaaatcatcgcggaacgagtgcgcggtagcaaatgggtctttgtgtcggaacattcctttattctttgcatctggagtttgaaagcatgcatgctggtgatctatgcgcgtatcacgtatgttgaacctcgattgggagcatgttcttttctaacgccaatacagtgaaggattaaagcagaagcgttggatcaactatgtctcgatctacgtcggactaggcttcgtcgcaaccgaactgtcactcttcctactctgccacccattaaaagactactgggccgtcgtcccagagccagactaccaatgctcatcttaccagtactacgaaatcgtgcagggctgcatctcaatctctgccgacgtattcatgctcctcatcgccattcccatgctagtccaggtccgcgtcccgctcaagcaaaagctgatcctgactatcctcttcggcatgggcgtcttcgtcattgtcgccgccgtcctgaacaaggtgtactgcctcgtcccatctctgatctcctacgtctacatgaactggtacttccgtgaagccaccgtcgccatcctagtcaccaacctgccgctcgtctggtcactgctccgcgacgtcttccccgccctcaagagctggaccggcggctccagacgcggcaccgaccgctacaagtccgggccctggaccagcaagggtggctcccacctgcctccctatggcccgcccagccacacgcgctcaggcgacttcggcatgcaagaattcgaaggcaccactacgattaccccgcaaaaggcgactgcttccgatgccagtatcagcgaggggcgggcgagcagcgacgatggctcggctcgcgctctgcgcattcgccaggatatcacggttacggtggagcgggactcgcggccgtcggattatgaggtgaatacttcgcgtatcacccgcgcccgcgaggaggtttaatctttaatcgactctctacacggagaacgttgtcgttctctttttcttatgaatccacgaagtccccgagggcttaatacccagtcctgtatattgtctctattttgtctgtacatatttacttctagacactaattgtgcatatctttttttctctgaatatagagttttccttggagtctcagttgaattgcgtattccattaactataatctccactgtcatgtccacacatctcagcttccagtcccaccgatgtccaaaaccccggtgagttaaccacttttcaaagatgcaaccttggaatacattccatcacagcccgccgatctcccggccccttgcatccagatgccgatcttgtcggtgaagagcttaggcctacgtccgaagaactctgcagggatttggtgaactggcggatatggctcgggcgtcttccttgaaaagcacgtatccccggttccgacaaccaatgtggcgtcgtagccatgcaaagccaagatggttcatgactatcagcactgaggccaagccgcacggagtaactgactagtacatcatccttgaatcagtcacaggctatatacatactacccggaagaccaccgtccgaaatcacgtcgtgacccgagaaaaaaggcgaaaccttgggatcaaccaaaatctcagccgaaatctcaaccgaaaaatcgttcctcaaggttcccaccccacagtcgatcggcacatgaatcttggaaaaaaatctgatacgaaagaaaaagactgggacccgaaagccaaagatatgagggcaaatgcttgaccgagcaatatccaagtggatgtgttcatggataccccaccataccaaatccaggaccctggccaaagccaccagttcactgcgcactaccgtggacgaagctcaagctctcccgaacaacgggatctgcgtggagactagagcgacctcgggatgtgacgtgataagggaaaaatggagcaattagcaattgtcgtcggtcatagtatctgcttgtgctcccgaggtaccctttgtgtttggaattgcaatggatactgtgtatggcgtattattagaagactgtctacggagtaaatgtgaactatttcagtcgaccgtaagccgcgtcagtctaataaatctgagtttcaactgagtttcggcgacccagccttgcaggaaaccttgagccgtcaacttccttacaatatatatgatgtatcttatatcttgtaattgacggagtccggcagatatataagcccttctgctagatgtttaaaccctaaaccacgtgtcttcggcctcatttttgagtgataagccgatcagctacccctattcgagcaagctgcacggataatctgctatattagacttctgccatgtgctggaggggttcactcgcaaagttagttcaacggcctcggtacttgcatgatcatactcgaagtcgtactctcctcctattatttgattgcactccgtacactatgttgtatctactccgtaccatagtgggccccgttcagccgagtactgtactatgtatataacagtttatcttttcctaataaggaggtaatttgccttttcctttcctttttcagcaagtgcactattcatttccttttcgctgtttttcttttcgcctttcttctcttctctgcttcggcgtaacccgcttgaccccaccaagaccaagacctcgcccttcgaccgcggctactccgtacatatgttgtatgtgctgacgcgctctgctctgagttatgggcccactctctatttgcatacaaagttgcccaggcttaacctctcgcttacagtttggatggctgcggggatgctcacctaaataggagctttgcccgttgattcggccttcaggtacggagaacgccgtgcatatgcagggttggcaaagaatcatgtaacattacaacatccatggtggcgaattgccgggcggtttgccttcgctctagctgcgtctcaggcatgcatgagtagtctctaggtaggaacggttcttcgttcgccgcgaatgtctcgtataaaaggttgaatgtggttatcacgtgcgacatttggtccaatctttctcgaccaaagtctattcgaaacccctcaatagtgcgagtttacaatataacagaagtatacctcagaaactcaaccttgggagcatccatataagcaaaagtccaccttgaagtctaaataaatgtcttgaggttgcgttatccatgaagggtcccgggcgaaatatatactacggaatgatttctggcatagctactcacaaccttcaatatattcacagatctttgatactacgtactttaagtaggtagtatacacagactagatggcaccgacctaatcttgcgtatgattgaggctagaagacacaaaaattatagactcttgttgtttccgtttattgaacttactttcgagtgcaagagagttcgttgtcatttagatatcacaaaatgaagtagacccgatattataggacacccgctctggtcaagaccaaggccggctatatctcagcacttggacagatagagggtatatatatatccgattctgagataagcacgtcgtctacaatatatttccacccttccacaaggttacatatatcccaagtcatctctggattttgagatactcgagaccttctatgcccatgtcggatgttcacattctatcagggcaacggaagcataccaacctcaccaatcatgtgttcgtcctgcaagatctatgaagtcgatacacctaattagtgtgatgtagttaagagctggttgtggtttagctgtctcattcagaattcattcgactaccatgtgcttttgcttttacctacaatagggttgaaatatacataattttggttgaattttgagatagagaaaatctattaacatgattgtcgaggctaataagccttcgactcgggacgtatccaccctgcgaaggctacataagtacatgaaaagagaatgcgaaagatactgcaacgccgtgcgaacgtaaacaaagccggaaaacaaaatcatgagaaagtcatgtaccaatgcgtttcgcgttttagcataacaaatttaagaaacccgatcctgtttaatcgtacagatcaggcgagacggggttatcagccatctcagcgtcaagatcatcctcgtccatcatttcatcatcgctcatctcactagcctcgccaagatcgtggttaggcaagacatcgatgcgactgtcgcgcatgacaacatgggcgacctcgccatccttgatacttccgcgcagaatgagcacagcaagacggttgaggatttcgcgctcgatgagtcggcccaagggacgagcaccataggctggggagtagcctgctgcgccgaggtagtccttgacttcgtcgctacattcgatagtaacattgcgctcgttgttgtcgagccgcttctgcacctcggaaagacggaggtccacaatcttgcgaatctcccgccttgtgagacggttgaagatgacggtgctggagatacggttaaggaactccggcaggaagtagtcgcgcagagcgttcatcaccaactcgcgggtctggggctcgatgcgaccgtccttggtagtcgggcgggagagatattgagcacccaagttggaggtcatgacgacgatgcagttctttgcgtcgacgacacggccctggccgtcggtgatacggccatcatccataagctgtaggaggacagtgaggacttcctttgcggccttctcgacctcatcgaagagcaagatcgagaatgggcggcgacgcaggctttcggtaagttggccaccggcgtcgtggccaacgtatccggggggtgcaccgatcatacggctgagcgagtgtcgctcttggtactcggacatatcgaaccggatcattgccttgggatcatcgaacaggaattcggcaagcgcttttgtgagcagtgtcttaccggtaccggagggaccacagaacaagaagctgggaggcgcgttagggttactgagacccgagcgctgcaagcgaatggcgttagagaccgaaacaacagcttccttctgaccaacaacaaccttggaaaggtatttctccatgttaagcagcttgtccttttcagtggtcttgagtctgttaacaggaataccggtccagcggccaacgatttcattgatttgatcgggaccaactgcatcggcaaggagtgcttcaccagagtcgcccgcttgagcgcggcgttcagcatcagccttggcccgctcagtctccagacgctcgatgagagctttggtttccgggatggcgtagtattcgagatcagcggctgtctgggtatcgcccaatcgttcggcttcgtcacgcttgaccttgagagaatccaacttgatcttggcctcctgaacttcgcggctgcgctgcttctcattttcgtacttctcgcgcatcggccgaagctcctcgccaacattggcagcttcctgcttggcggcctcgagacgagccttggatgcttcgtcttgctcacggccaagggcgtgaatttcaatttgaagctggcgggcctttctttccagtgtgtcgagggcttctggctcggactcgcgagtgactcggactgcagctgcagcctcatcaatcaaatcgaccgcagaatcggggagtcgacgagctgtcaggtagcgagatgcgagagtggcggcagcgacgatggctccatcgagaatgttgacaccgtggtgagcctcgtatttttccttcagaccacgaagaatagagatggtttctgggactgtaggctccttgacaaggacttgctggaatcgtcgctcgaaagcctgatccttctcgatatacttgcggtattcagagagagtcgtggcaccaatacaatgcaattggccacgagccagcatgggcttgagaaggttggcagcgtccataccgccttcgccgctagaaccagcgcccataagcaggtgaatctcatcgacgaagaggagaatggtatccttggaatcttcgatttccttgaggacacccttcatacgttcttcgaattcaccgcggtatttgctgcccgcaaccagagaaccgacatcaagagaaagaagacggcactgagcgaggttggcagggatatcggcgttgacaatacggcgagcgaggccttcgacaatggtggtcttaccgacaccaggctcaccaataagcacagggttgttcttcgtgcggcgactgagaatacgaatgacacggcggatttcctcctctcggccaatgaccggatcgatcttgccctcacgagccaaggcagtcatatcaatggtgaacttcttcaggttttcattctcgccctcggcatcggcggtcttggagtcgacccgctttgtaccgcgaatttgctggatagcagtgtcgatcaacttgagattgggaatattggcatcgcctagcgcacgctgaacttgtgaatcctggcaaacagactgaatgagatgatcaactgcgacgaagctgtccttttgtgttttcgacaaatcggtggctgcccgaatgactttagagagttggggagaaacactggggttctctggagggggatcttgactgggcaggcggaccaatagcttcattagcgatcggtcgaggagttgagggtcgccgtgggctcgttcaacgacctggcggaagagaggggcggctgcggaatcgtgggatgcgtgggcaccagaaggagtctgttgatcttgagactcatctggggaggggttgagcaatgcgactgccaagtgaagaggcatgatctgggagtgtgcatattgctcgcagagcccgctggagtccagcagggccttgttggcccgatctgtgaattggacgccgttcattttgaacggaagagtggggtaatatcaattaggtttagatgcactgatatagatgcactgatatcccgagggggattatagcagtggtgtaagaatagaaagtaattgagtgagtagacttgagaatgattgacttgaaggacgagaggctagttcatatactctgctgcgcggggtgcccgaagctgccaccacatccatgtcgtcactactcgtttccaccgccttccagaagctgcctgacattgcctgacggtgccagatattgcctgatgtttccgaacaaacgccgaacatcggagattccggagaaaccattaatccatagtaactatggacactcaatgacacttacattttgcgacacgcatgcactataactagtcagtcaattaccgccttattttataaggtaaggtttcccagggccaatgttgttattcaaggtaggtgtcgatccatatttagtcaattaagccttattttgcacgaggcaacagattgtacggaacactccgtaccgcctggcagattgtactggcacatgacatgtcaaagtcagctcacgtgaagcggacgatatagacacgtgatgatattggcacgtggaggcacgtgatccacgtgacaatggagttgctgacctcagccctatccgttccgagatgaggtcagcattctcggattcttggaaggttaaatcgcgcaaaccagaacccttggatgttcaggctctccacgttagagagatgattcggcattgatgttcctcgagcttgcgtgccttgcagtggagcattgaaacaactcagttccaccggctcctcttacccgcaaaagtccagatatgaacaaccgatgtggcagccaggcgccatttacatagcaacaattactttcagccaggcttctgccatgcgtcgcgtatgttttttatatcgtgttccacgatagccgacagaaaatatcctacagctagtgaatgacgtcaggtgggatctccgcagagcaattaaaattcgaagaaatcgatctggaaccttgcccgggatcagacctcccccttgcaagtacctgctcagactaggccgagggatttttatacacgctttatctgtgcctttggaatcagcaccgtttaggaaaccgactttcacggggctgcatgcgagaggagtaccgtctcagatgagaagctaagagacgactggaccgtggatggtggacacttgttccaggtcgacgcatccagaattgaagatcgatccacaggcctgtccacaaggtgttgtcctattggccgtttcatcacgggaaggtggtcttgagattttttgtttcgtgtctccttggctggagagggatgagaaaaaatagaagcggaaaggtttctgcggggcagagaggggcaggaggctttatggcgttcatgatttcaacattgctcccttgcctaggaggcatgttgaagccaatgaagccaatggataagattgcatatgtattatgtactccgtgcatggtatgcagtgctacatgtaccacatctatacgaagtactactataacaatcctactatgtactacaaggacggaccatgctatactacaagctagcttatacgtaaaatgcctgggctaactaactgattcgtagatctgcctccataattacatatttttcatttcttttccatttttccaaggtcaaactaggaatccaactctggtagctctccgcatcccgaaggctccctgaaaaccaatgaaatcaaatcaaatcggcaattaaacctggtacctatgtcatttgttcatataaagagttttaacccccccctctgcatctctttttcattgttctaacgccatagttgcagctgagacaactagaaagctctcacattcgctgtacgtttgtgaagaaaagacccgccacccaaaccagaaaatttctgtttcgccacagcttcaacggctggatttgaattatccctgctttaattgatcagaacgtgagatccactggacgtttatttacaattacctttgttgacttttgctgagattgaacctgcaggttacagttatctcggtcagtattaaatcatcgcaccgcatacaatatgtcagacaagccgatctttgtggctacgcatccgcgagcatgctcgacggcctttgagcgagtaagagatcccgagagattcggataaccaatttattctaaacacatatctaatggcctgcaggtgttcatgactcagcgagatattatccaatgtgtccatgagccgttcggtgatgcattctattatggcccagagcgcctatctagccgattcgcaggcgatgaacatgcgcaagaacgcgtggatagtggattcgccaactcgacatatagtaccgtgatggaaaggctggagcgagaagctacacaggtccgacccttctttctgcgaagtctctcgcgttcttacccatccccctcgtaatgctcttcaagttctccctgtggatcgaacatgagggaagatcccttacctgtttactttttttatcttgcacagatgtagcccgagacaatttgtcccccgtctacaactgtagatcacacactggctccaaattattgaccatggagacccgcacgacggaatggaatgttcgcactttttgaggggatacttaccttgttacagggaaagagagtctttatcaaagatatcgaccactatttgctcccaccgaatggtcagcccgccagcattgccccttctctactgcgcgttaagcgaggagtcggcaccaacggcgactcgacggctaacggtgtgaacggtgccaacggcactcacaccaatggccactctgtcacgccaaacggtcacaccaacggggtcaacggagcctcgaatggaaccaacggcacgacgaacggtgtgaacggtcacaccaatggaacatccaaggaaccctacccgtacgacacgcccgcagagctgggaaacccaacggtgatgcctcgcgagctgcaagagaagttccactgggcattcctaattcgtgacccgcactacagcgtgccgtcgtacctgcggtgcacgatcccacctctggatgaggtgaccgggttccacaactatgacccgctggaggccgggtacgacgagctccgccgacacttcgattatctgcgagatactggattggtcgggccccgggttgcaacgcgcccggagctgaacgcccagactgatgcgcaggcgccggctggcgttgaggtctgtgttatcgacgcggatgatatgctcgatgagccggcgaagaccatcgaggctttctgtaacagtgttggtttgccgtaccgcccggaaatgctgttttgggataacgaggaggaacatgctgttgctcggaatgcgttcgagaagtggcgtggattccataatgatgctattgagtcgaaggctctggagcagagaactcatgtaagttttgtggtcattgatgtgggggtatggggacttggactttggactaacactgtttatagaaacgtgctgtcaagaccgaggaacagtttgacgccgagtggcagaagaagtacggtgagaagcaagctgctctcatccgccgaaccgtcgacgccaacatggccgactatctgtacctcaagtcatttgtcgtgaaggtctagaagaaataagcgaaacaagagtggaagagaaagaagagaaagaagagaaagaagggagacaagggggaacctaccccatattatttcttatgagaacgatttggtacggatggcgccatctccacggggattggttgatgaccatgacgatcttgcgtattgcgtatgctctttgttccatttggccgatgttatagctacttgctggattttcaagtttacttagcttaagatatagttaagtactggctattgaccatgtcgtattagcctaaggttgatatatacttccggcagttccttcctatttgggccatccacggattaataggccagtattccgtagctctttcctccctttcattactttacactgtacctgcctattaagtctcgtcaacacattcgaaaccataaacggaaagtccagaagtatcgaattgggttgaggttgtcttcgcccaagtgttgagaccgtttctgcctcagattattcgtccgggtacttcccttcccttcccttggcagcccccggtcattacttactaccgttagatctattcggagggcgtctgagaaatacaactactcctataagacaggcaaggatttcgagtcgtacaagcgccacagtcattgctaatattcaagctaatagaatcataaaattttcgacgtgtcaacatatcacttgaaatacaaatatgaccaggtattctttcaagtaccgaaattaatggataaaggtcaagtctgctagcagcatggccgtctgaggcagtggtgcgcgcctatttgtggaccttggcgttagccttgagggcactgttcggcacatagagaggcatcgagtcctcccagatcgaatcagtaagcacacgcttattcgagccatcggcattcataacgacgacctgaccataaggctggaaagtctgatcatagagagcacactcgtactggaagccgaacatgccggaagagtaggcaatgcgaccatcccaagtccagatggcatgagcatcattggcaccactgctagtgagaaccttgacatcagttccatcaggacgcatagtgcagatatcgtagttgtaatcactggtcttgcgggtaaagacgattctctttccatcgggggagaaggaaggcaggttatcccactcattggtcaagacagtggtcttacgggtctccagatccagaacacggagtccgagctgggatctgtcgcccagggtggagtttgttccccaaatgcggaagacgatcttcttgccgtcgtgcgagaagctggggaagccggagttgatcacgctgctgttgctgctgagggttgtggtgctctcggacaggacttcggagtacgagccattggcagtggctcggacaagccagccgccnnnnnnnnnnnnnnnnnnnnnnnnnnnnnnnnnnnnnnnnnnnnnnnnnnnnnnnnnnnnnnnnnnnnnnnnnnnnnnnnnnnnnnnnnnnnnnnnnnnnnnnnnnnnnnnnnnnnnnnnnnnnnnnnnnnnnnnnnnnnnnnnnnnnnnnnnnnnnnnnnnnnnnnnnnnnnnnnnnnnnnnnnnnnnnnnnnnnnnnnnnnnnnnnnnnnnnnnnnnnnnnnnnnnnnnnnnnnnnnnnnnnntcgtacaagccagccgccgccggtggcgcggccttggaaccagaagccgactccgaaggagacccacttgccatcgggcgaccaggccgggttgaaggcgcctgcggtgcccttggcgacggacgacgcgtcaatgaagtcggattccatgtcattgtagactaggctctcgtcggttccgttggcgttgaaggaaacaatggaggagtttccaagctgcttctcagtcagagcgatcttgttggtgctggacaactgggggaagacgtcggtgaagcgatattcccactccgtgtcccagctgtacaacttcttgtccataggacggatagtccaggcgttcttctcatagacgaccttcttgccatctggagaccaggcaggagagcggataatctcgctagtggtgttcacgtatccaccggcagtggtgtggagtccttcgataccggaacccttgccggcgtaggcgatagtgccgttggggagatattgagggaagagcttcacgccagttccctcggcttccacgcgacggttagcgcctgtggcaaactccacggagacaatgctggagttggcagagttgagtgactcaggacggtgagcgttccaggtgttctcacgagtcatctcgtagtaaacaatacgctcgccatcgggagaccacttgggcgaaccaagacagtaaccagacttcgacacgacgggacggaaatcagatccattggggcggatagcatagatggacagctcctgtgtatgttcccagccggtgacaccttggaagatggggtctccgtgtccgtaccagccagtgttacggtccgacgagaaagcaatccattggccgtcgggagaccacgaagggcggaaatagccatcaggaagagaagtattggcggcagtcgagacggtatctgtgaggttccatttcttgccactctccagatccaggacccagatgttggccttgtaaccattggcagtggacacataggcgacttgctttccattcggagacacgacagctccgtcttccaccgaggaggttgctaccaactcctcaaggtcagacccgttggtccggacgcggtagatatccgaattaccgtcaccattgcgctctccggtgaaggtgatccattctccatcgggggaaaaggtggcatggtattcatagatagagttggagaggagaggacgttcatcagtgccatcaacattggcaacataaagctctgatgtcccgggagcaatgcggttcatgtagaagattcccttcttgtcagacgacgccgccttgcgcggttcgtgcgcatgcggagagggcgtgttcctcttctcaaggttcatctgctctgcatatgggcaaagagccaaagccgacggcaaggcaaggcccagcagggcaattgaagcgggaaaatgcatagtgaaaatgagtcagtgcaccacagcagttcaaggaccggagcccgttatttctggcaccgccatacttatacataaaacttctgcaggggaaacaggcctgaaggaccgtagcgcacttctctcctccacaggcccaccttcgcgtaatgaagtccgcgttattagcgggccttcatcttatctgatgaagcaagctagcgagtgaccaccgaccactgaaaagtcctgcagaatatttgaccattcatctgattggctctgtcaaatgaagctgtgacttgcagggctcgaaacaaggcaatgatcgtcgtggctcgagatgaacggagaaagcctcttccgtcggttaccgatacattattgttgtaccttggggttttgatataccctgtctgcacaaggggtgtatatctatgcgcctaagtcgacgtacaacaagatcagggtctgcagtatgcaagagagagacgatcagttcttacgcacaactaccgaccctcgatacgtcaattagggctcgggtactggagcgagaaacccgaatgccaagaaattggcacggagatatccctttgatcttgcacaatatcctgctgacccaggcaactccgcctatctcgttcgtcaatataatccaccgaccttgcaagctcgagcgccgacgcaattcttcggcttggcaactaccattctggcacgcaaaatctgcccctttcttggtttaatatcgggaagactcgtaaaactcgagttaccgaattaggacgaaggtctagccaatcaggaagaagacacctattttacaccatctctacatctattattctcgatcaagggtcttccttctgagataacttcgtcagggcccgattaggattcacgatctaggcagtttaggaacgccagttaatggaatttggagtctccctgatcaatgtttcgagtcttcacgagctccttacgaatctccccgagctactagcccctctttactcttcctgcatgcccaacagcataaaaattgaatcgttggacataatcggagtccgaatatcggtccggactaccagattaaggggataaagcgtagatcgaaggtggatcagtctcattgtcgtcttggcactgggctgttgtcaatgaagtgccaagtttccgagaggccggatcctgaagttcgccaataagtacgaagtacagtgtagcgtgggaaggccgttgataatggagccacttgcatgcatttggccaggaggcacgcccgatattcaatactacctacaacatacaacatataactatttctgaattaggaagtctagactctacagggctagccttatggtatgcgaaacacagtgtgctttaatcaagtcaatgagagaggatgtttgttgagaaggcataaggcctctttagtgcttagtgagtaaccattgacggttctcgtgagcaagagtgggtaaagtcaatgcatttgatacgagtcagaggacagaacaagagtggactacagggaccgaggcacgggatccttcaaagcgtagcgtaagcttgtttgttgcctgcccgtgcggtgacttgggactgcttagttatctgggttttagacagctctagacgttgggaggaagctgtagacttgaattgcaagagctcctaccaattcgatgatcgaggctctagaagaccttgagacttcttcggcggaaatgtggatcttacagaagattatgacgagtagattgcgagtagattgctatttaacagccttggcttttcagacactcatggttgtgccatgtcctgaggtatcgttaacttcgataaacgtctggggaagtgttgccccatacaaaccgaagactgacacgtcagagacagacaacagtctcactagcaatcttcggtgatcggcgcaagcatgggtagacgcaatgctgcatcctaggttacaacattatagaagggctaagtgactctagtgtaaaggacgcgaagatcgtaataactggcctggaatcatatcattcgttatggccaagcatataaacacctcatctagcgccaaaactcatcaagaaacatacacaacctgcaaggcattgaaccccggccgaaacagcccagcaagaaaaagaagatatggtatcttcatccaaaagtacaaaccactatagaaaccagtccatccaagctaagttccttcataccgcactgtagccaccgcgcgagcccgctccttgcagagtattgaccacacgacggagccagtcctggaagaggtaagggatatcgcggatggtgtcgccgtgggggaggagatcccagccacgggcgccgtaacggttgtagttgagccaggagccgaagatgagataggcagcgatgccgaggaaggcactgaatagaatgattagtagggcaatttaatgcggaggccacaagaaaatgaagctcctaagaacgaagaaaaactcacatgataagcaaccaggtaaagaagccccagctcttagatccgggggtatcacccttctccttatcgtactcgtcgcaggcatactttgtgcgccaatccaatctcaggatataagtatcatcatccgacggaccaaagctcttgaactgcagactactgctgctgttgcccgagggcacatcgccaccttcctcgccatccgctctccgtcgtcgctccttcgtctcgacgtcatctccaagtgtattcaggccctccagtccagatcggtcgtggtcgcactggaagtcaatgatagcgcctgccttcttggcattctggtcattgccatctcccttgtatgagccgccttccaatttaacgcgtaatccctccgtttccgggtcgagatccttcaatcgcttcagttctgggttcttcgagccctggccaacggggtcgagcccaacgatcgggaaaccgaatgtagagccgccatttccgtcctttgctactcgatgcacgaatccgcaaactggagaaatacataaattagcgtgaacaccccaagcagatgaccaactcaacatggtcgtgtcatctcagcctagaacgtaccgtttttgctagtgccgcacgtcgcatcgccgtaccgagcagcgccgccgaggatattgcagatattcaatcgataggttgtattcgtcacgaagtcatccgtcgtcacggtgtgggtcacctcgtgaacgccttttaggggactgagatcgtatttgtaattgtcgagcttgatgtgcgcgcagtcgaatccggacgcggatgccagactcggtaggagggcggagaggaggagtgaaactccgcttgattgtattcgcattttggtcaatgtgccgttgggtagttaggtggcgatgggtagagtggaaggacgcgggtgaaggctgggatgaggctttcgcgcgaacggagctcgatagctcaagtggagatggtcacgagggacagctgtacacaggacaagtgtaaccagtgcagtttgatcgaaaatggaggagaactggttaccgagttcggggtccctgtgaggttgaaaagtgacgatgacggggatgatcctacggaggtgtttcgtttctccggtggcggtgttttggcactaaaatgtgcttcactcaactcggaatgaagatgcctcaaagtatttgaagctatctctggagtttaatagttcaatgacttttcaacatgttttttatattcttcagagaaagtagcctatgatgtcactccagatgtcacctcagtacccgatggcctaacacccgatgtatggatgtaaagaagatagaagcaaaatagaagaaccgatatatccgaaaaagaagcctacataaggcctattaatactctgcaacctatatattctactgtatagatccctatccctacaaacaccaacctcatccagctcatcgccacgcacagaccacccactcaaacccgatatcaaacgcgcaaaccaaccaacccgcaacgaggacagaacaaatcccagacacgaaagaacaaacaaatcccaaagcccaaccaaataaccacccaccagacagccaaaatggtgcagccgcgtatggtaagcccaacccccaccaagctcaaacgcgacaaaccccaccaaagcccagctcgcaagctaatcggatcaacgcgcagctcacaaaagcggacgagacatcagccaatgatgagaatgaagtccgtcgcgaggatcaggagaagatcaaccggttcagtcggttgcatcagcgcgagaccgtgcttcaggaggagttgaaggggaagcaggtatggactttggacttttgaggattttgttctctgccatgtatcggatctcttgctaactggtttatagaaggataaggaagatttggaagaggtttcgatggagttggagcttgctgatgaagatgagcttgtgccgtaaggaatacctttcccatctattcttgcttttgtttttttcgatcatgttctgttgtggcttttctctgtgattctcatctcggagtattacgaagaaacctaaaaaagagcaagaacaggaagaagccatcactaacaaccttcacagctacaaaatcggcgactcattcttccaactaccgctatcagacgcgcagggaatgctctcgacatcaacagagaagatcgatgcagatgtttctaagctagaggactcgcttggtgagctgcgtgaggaaatgcagcagctgaaggttgcactctatgcgcggtttggtcggagcattaacctggagacttgattaggatgaattggatgtattaccactatcactttttgtctcttgggacttatttctcatgattttctattatctatcttaaaaatggggaccgaggtttgacaatcttcaattgttgtctagattaacatgcggatggatgaacttcatgatatgtttgctcatggcatctgcttcatacctcataattataggtacatggtatgaatatgtagataaagccagacattataagtcaggtggaaccacagctcgttattatcattcaaatagaacacggtagtaaagaggtatctaagaaggcgggaagaaaaaaggagagaagagaaacacaacaggaactaccaacgaaacaagtaggcaaaacagatggctccaaacctgtggcatatatttaggaaccgcagggttccacgcgaatcgacacagataacagtgatgcctagccatctggctagcggtgaccagttcaccgatctaaaaccaatgtgagggtcctccaaatcaataaaactgaagtcatggccgcacttctgtacgccgatattgtcgtgggcctcgtccaggagggatatatatacagcgcgcgcatttgtgttttatgtgtttcccgtgtgcgaaagttgatcaccggaacttggcacggcagcggcccatgatctcattctggcagaccagttcagcgctgaattcactgccgtctagtgtaaggtagatatcgaagtagacacggtagaagatgccctggggtgtatccatgcgctcgaagtcggtctcgaggttcttgcgagagagatcggatgtgagtgtgacgagttccttgatgcctaggaaaatattagtaatttgtacaaggaaaatgcaatctctcaacttacgtggatccttggtgtattcggggcagacatcctcatcgcaggcgtacagcacgtcctcgtacatgagggtagcgccaggtgcaacttgacggaagaagctgaccttgactggttcgccaatcctgacacgctctcccttttggacaaagatttgacgggtgtacttgcatcgatcgcggccatccaaacttggtacacggtactgttcagggtgatatccctccttgaatggctgaagcgtggccatgaggtagtgtcgacgtgccacacggtgcgtgatgacccgctcggtaatacctgcggtgactgcgcccttgacaatggccgccacagagtccatcggacggaccacctttgtctgatactgtggtggcacgtggagcttgatctgctggaagaggtattctgaagcaccaaatccaccgacgaccagaacgttctacacaattgttagcactgcattgagactaggatgagatgctcttacctggagcagacggttctgtgcttgaatggcgataatctggttgcgcaccagctcgaggatacggttcacgacaggctcgaaacactgaaggatctcctcgttcgtgaaggtcatgtagccttcctcaataccagcatcggggaagtcggcctcgatacccacgtccactgcccatttttgtccattattgcggaagtcggccttgatacggttctcgaagtccatgatacacttcgcgtagaccttgcccgcagtccgtgacccatccggcagcttcattttacggatcttggcgcgcaagatgttactgaaattgcggttcagtgccgtcgaaccacacgagtcaccagacccggcagtacattccatcacactgaaaggcgactcttcctccacctcatatgcgatcaaatccacggtaccaccaccacaatccacaatcaaaatagcatcgcccaccttcaagttgagcagtccgctcttggcacagaacaaggcggctgcctcgggctctgagactagcgtgagacggttatcgttctcgtcgcgcaagaagccagcttggatagcagcagtccgggtcgcagccttgccggcgtcgttccaaatagccggtaccgtcagatagtaacggatattgcgttcctcgcgcgtgaacacctctcccagggccttttgcaggttagcgcgaatggcttgtcgtagcttgaagaggtaatcggcagcgacatcgatttcggacttgcccggggggagggggggcaagttgatgggatcaatgtaggtgtttccagagagcatcagttgaagcttgaaccactccaccttctgcacttggggcttggggtatccggttggggcgagagcgtcggcaatatcggggccccatcctaccaccttttggtattggtcgtagtagaggacggtaggaatctaggagagcagatcgttgtcagactagccttcctggggtgtacttgttaagttgcgctcaccttttgttttgcatgggtcccggcgcctggccattccgtgatgatgtcctcgctggcctggttgttggtcgcaaatgcatatgcgacacccgagaaggttgtaccaaagtcaataccgacaatcagttgggccttgctccggccaccaccctcaacttcgaccgcagggttgcgccctggatactgggtattggacagtgacggtggaatgctaggagccatctgctgttgctgcatcccataccccggcgggccgttcaagggagcatttgagttgtattggaggtttgtggtaatgggcgggggctgttgaccatgcgccattggactagttggtcggttgtttgtgtaacttggcggtcggcctaactggggctgggtctgttgatggttcattggaagacttgttgttgatgaactggaggggggtgatgaaggggtgggagggacaatcgggttggaattaggaggagattttttgttcctaaagccaaaggacttaaatcgggaactcatgaggtccatatgaggcaacaaggaagggaaaagagtaagaaaccggaaggggggggaagatgaaagagggggaaagtgaggctgagggatgtaaattgtggagatcaaagagactgaaagaatgacaacacggaagataatcagtttacagtaatttagttttaaaattagcaaattattagaagatgaagaagatgaagaagattgacgatttaaatcccgactctctggttgaggcttctggttgaggctgagaaactggtttatactagttctacttaaatgtggccccatatatagtcattgtttataagataccagaatcgagtacggagtagtagttccgctataaacatgtgaatcgccaaattattcaaattcttgttattcgaatgcattcaggctcacagtttctcttggcgcccaggtcttcgcggggtagggagtatatacatgttcttgagacatgttttattctatgtacatcgaggtagtataactatagaggttcccaagtctccccttttcaccgatccaacactaatcccccagctggattactctctttctttgtccaaagtttggcccccaaaggtgagaaaataaaaataggaacacagccttgtctagcctccgaggtgtgttggctactcccataccgccctatataccgcctgcctaggaagcatggttggtgtgtttattttgtttgaatggggttttgaaccggcagaaccggcagaatcttaaaagcggtatgttgtaccgaccagccccattaaactgccagttttcgcgcgacccagtgggagggttgataaagattctgaagcatgctgttagggtcctggatgtagccgcaagccttccgagctccacgcttctcgaggcggaagcccatatgctccacgaggctcagcacttcttcctcggataactccacattgcccggctcgccaattccagccccctcgtattcggagccacttcctctacgggagtggccgtcatcgaaatgccataataatgggcccacgttgatccagagcccatttggtttgaggctatgtcggatcgtctcgatgtaccgaatgaggtttggcgccgtgtcaatgaagaaaacagtcgttactgcgtcgaacatctcatggctctcgggctgagtatacaatacggtaaaatccgctgcggtcatggacattgtacctaagtggtgaccagcactggcagcctcctgcatggcgaacccggggtgcacctcagggatcataacttgctggagttgctgtgctcgtgattggagattggaaaaatgcaatgcaaaaggatgaagcgcgtgctttgccgccccgttagtatggttcagaacccagctactggctagcagctggtggtaggagatctcattcccctcggcatcatagcctgccatgcagatctcaaaaactagacggcccaggccagcgccagggactaaaacacggatttgctcaccgctatcacgccgtgtctggaactcctcgtgaagatcctgaagaacggggtcatagcagacttccctctcgggtcgtccttcgaggctccagtcccgatagaactggcgtatcgtggaatgcgctttgttgacatctgatgaggttgctacgtcatgccaatattgagtagggtccgttttgtcgggatttgctgaaagaccgaatgagtgaagacccaccgccagaattgcatcggcgatatcggcgttggtatcaatggcatcgtccactttattgaagttatcaaggatggagaacggaggctccgagagcatctgccagtgtgccgagggcagggcatagaaagcttgccgtcgacgatgggtagtattcatatgcgcatttcgccgatattgtctgtggatatattagccagaactttgcgattgtatgttaattggttgtttcgaggcagaaaatattgtaatcaactgtccatccacgtacctgaatgagtcgaatgcagcaaatagcaccctacgctcttcaggatcagcgaaagggttgaagtcacctccccaaccgttctcctcctccccggtctccggcttttgatgctcggccatgcagaggttgtcagcctagctccacactaaaggtgctggtcaatgctacaggttcacccgtcccatgagtgaactgatagtgacgaaggaggaacaattgttgaaaaaacgagaagagtatatggaggggcagacaaaacaagtgggaatccctcctattgggtaaatttatttaccgctctactctccgccttctcatctgggaacagaaacatcataggatgggtgtatacctgtaacaaatataatatagaaatatatatatgcatctgttcatccattagacgttagggatccgatgatccttcatctgcctatatttgactgttgaaaaagagacaaaaggaggacaagtggttttctgccggcataataccttaagggaatgaaccaatagtggctgttatggcgcaccgtattgtagagcggggattcgatatcgaattcccgactttcaacaacttgtctaaataccattctcgccacagatttcttcctttacaccgagaatcggtgaacacaaatatggcgaccgaagccccaccagccgttccttcggcagagctagccactcccgccgtcaggcctcaagagctctcattcagcttgcccagagctttgcatacgacggcacatgttcatttgaccttcttgggtaattgtgccacaatattcctggctacctcatcaccaggcgactcgggcggttctatcaaacccatgggaagtttcgtctatgcgatgcccgatgtaagtaccttatctgccaagtgtggaatccttgccatattcaaggaaagacaatgtcattttctcatgtcataccatatggaggaatggccttattgtttggcatagccccgaaatggggctcctctgttcagtcggagtgggatatgctgcaatatgccgcgcaccccaacctcaagctcccattggcagaggagttgtcaggctaaacggatatccccgaacctgataattcatattgctgatatttccaatataattacttgctatcaggatttggctgacatctatacagcgcacttcgcccaagtcgacaatatcaacaacgctctacacatcaccatctagcatcgaatatacaacgcgcatatccaagatcctggctcgaagattttcgatgccagtctatgttggttgcagtattgacccacatagcatgggattggaagtcgcggaggaaatcgaagggctgaccaagatcgtcgacgtgatcacggagaaatgggaagagcacaaacaggagaaggctgggaatgctaaataaacgtttgaaaaaatgcaaatttattccaatcgacggtcagaaaaaagtacctaattggatctatcactggcctgattactcaacctaacttaccaccgatctcaaccagatcccaacactagccttcaacagtctccgccgggaagcggtcaccaggtcaccggcaaggaaagtcgaaagggatttatagttgtgtcgggttcatggagatcctaccaaccataagtagatgcccttactcgaggacataccacagtttccatgtggatgatacgttcagccgtaatagaaaatcaacttgtatctcagacgcaaatataactaagcttaattgccgcatgtgagacatcacatgcacgttgattccacttttcaccaggataccaggtatctatgttgtgcttatcactattgcatccaatgtggacattcttcaaactccacagtggcatatcgacacttgcataacttcatattccattcctaacaatcgcatcatcagacccacaatgaacgaagaataggaaaaacaaaattctccccacaatacaagcgaaaaaaaacccaaacccaaaaaagcttcgaacctccatctcctcggtaaacaacccgaaacatctccggtccgtcgaggaaaccccccatttggtctgtgacacccgccgactagcacacggaagacatcgggagtctcgggttgacaaccgtgacagttggcaagcagagcaaatcggaatgactcggttaacgggtgtttcatctcgatcgttgtcccgctgtggggcgttgagccgtgggcacacagaggtgaacatattatttgctccaacgtacgttgtatcttgatctggattgcccattctcaatgcccccagagtcaagtggacatcgcctggtttatcccagacacagagtcgtatctgccctgccccttgaaagtgggggcaaaggtcaaagcaatgtcacactatggctcttttcccctcggagccggccgacggtgtcttttatcgtatacaattggacccgtggacggctcggtagcggctgctgatagtcgcgtaccatgatatgtatgtcgaaagtataaaattagaatgggggccgattgcccgtcgcagatatggaagtgttccaattggagccctcgcaccacaccgcaagttccgaaacctaagcagggcaccaggccctcgtgtctagcttcaaactagcaacccaacaaagcatcaaaatatatttctgcagatatcattggggaggggcgcggtcaatgcacttacacgtgccattgcagactcccctgcataagatatggatattagttccggcagaaaacctatttggttagggttaagcgtttagctgcaagacgcatgtcggtccttgccaagttggggtcatgataggcggttatttgtttctttttttaaattgaaaacattcaaattaagttcgtcggcaaagtacgccgtactgtcacgggttgggggtctcggggcgagttccttggaagtacggagtagagtgctttctaaccgagggggtgtgcggggaaaaagggcttgggatggcgacattggaagtggatgggctcatgggtggcactatacctgtgctgattctagtcaaatcatgttgactggcaataccacccggtgagtcgggggaatcattaccctcgcttgatgagccgaccgggaaagttccgagggcgcatccgtgacctggcaatgtttaacgaaagactcccaaagtacggagtatccaagcggctgatgctgtctgtgccccacgatctttgctgtttttgctgtttttgctcttttggcccttttctttcttttcccctctgcacatcattcacagtccactctatccaccggtaaagcccaatgacgtgcaaccaaggcaccagtgggattgcgctggagatattctccattctcggtagtcgacccagattggagggaaacccggactagagatggcttggcgattcaagttgggctatcttgggacatggagtgacagagtcgagccctaacccatgtacccgacgccgtaggagatatacaaccctggacagcgttcggttaaagctcgggaaaccagccaaagccacagccaaaccttggacggccaagtcgaaagctaaaaagcaaaagaaaaagagaaattcgggccaacacatccgattccatgtggtcccggtgcacttccgaagtcgatcatcagggcttgtgcagagggacgagatcttcgtggacgtatcctctttttcgccctcgtttgctatatactcttatattagcattactagtccgaagtatactagattaattgtctatgcactctgcactaaatggaaatgggagttcatggaaatacaactactgactcgtccatcccaatccactgccacctccactgccgatctcgggatcacttgcttgtcttaccagtctaagatgtacatctgcgctatagagaagaggaaatagtcaagtctcggctcagatccgctgaagattccttaaccatatatgcgacggagtacggaagatcgtaatactctgcgtcgatctatagttcgttttttattattttctgtgcatttcccttttcttttctttttttcccttgagttgatttgacattccccaatctccctttcttcacaggattctttgatcttcatctgtcccaacctcggcatttacatactctattgtgccgggctttaggctgcaaatcttttctggctaatttctgaatttcctattttccttttctatttcgatctcgacaatggctttgcagtctgcattcgaataacacctttttaaggaaatcggaatcttgacgaaactgtggcgatagtccttatcttacgcgattctcaccacgtggacttttaatttgtttctcccagatttctctatttgactagagaaatacatcccaacatgcagccctctcattttcgtggtaatcagggctacgaactcccatccgtgcagtcggtgacgtcgggcgcattcccggctcccgcgctgctctccgctccgccgagcaggcctgacagcgggatgcgaatgtctcatctactgcagccgatgcccccagcggcgccggcgacatccccgtaccagcgttactatgactccgcctcgggctccccgggcgaaaccacgcttcccgatgcgccttcaatgggctcggggctgtaccaaaccagcccggggcatagccaacagaccgccgcgcagctacagcagaagcgcgcatatcgccagcgtagaaaagaccccagctgcgatgcgtgtcgcgagcgtaaggtcaaatgcgacgcctcggagtcgtccagttgcaccgaatgtaacaatcgcagggtccgctgtcagtttaccaaagagacgaaccgccgcatgtcgtccatcaagcaagtccaggatctggagaagcagttgcaaactacaaaacagcaattacagcacctgcagacgggcatgatgcggccggatcgcatggtcgatgttgacgagggtgtctcgcagatgattaagttgcctgagattgaatatcgaccggtgcgccgttcgagggcgcccatcccgcaggatttctccgacgtgcggtctaatctccgcgattacggccagggcatcatgaaggtgcccacgccgtatcgccaacagggtgcggagtcattggtgactaggaatgcgccgatcctaccggcgaagaagatagcagatcaactactggcccagtatttcagttgcattcactcggtacttccagtgctccattggcctatatttatcgcagagtatgaaaaggtttatcggatggggtcgttgttgggtgtctcgaatgaatgggcggcggtgctgtttggtgtgtttgcctgcggtgtcatccacacaaacgacgaggatcgagaggagcaagggaagaagtacgtacgcacatcctgtgggattattgatgtctggcacgacgtcttcaatttggatcgtgctcgcgcggcgctgctagcaagcatctttctctacgaggtcaattcgaagtcggctagttgggtgtggattggctcggcggtgcgcgtggctcaagagattggactgcacatcgactccggaccgtggcctgccgtcgaaggggagatgcggaagcgtgtttggtgggggttatacgcttgggaccgaatacttgcgctggaaatggggaagccagtattgatcaacgatcaggattgtgatatcgatctcccatgtcccgtggacgagcagtacatcacagaaggaggcaagatcccagacaaccagcaaaccacgcctttgctagctacgattcacgtcgtccggtccatcggccaactcacacgcaccctacgttcagcaaccatcagccccgccaccctcgagaccttcgaactccacttcaacacctgccttgcaacattcccctctcaattccaccctaagaccgacgaagacctcgaccctcgctctctcgccccggtaatctacctccaaaacgcccgcctcctcctccaccgccacaacatctcccccttctgtccagacatcgtccgcacctccgcactagactactgcgtttcgacagccctcgacacagccaacattctctcccgctgtatgcgcaactactcagtacgcccaagaccaccatgcatctacgacccccactcgcacttcgcctctaacgccagcgccctcctctgcacacacgtctggcgctgcacgctcttcctcctcttccgcggtgaatacggcggcgccctcgtatgcgtgaaagcgctctcagcagtcggcgacgtgcgcactgtcaacgcagcctgcgggcgctatatctccttcttcatgcgcaaattactcggctgcatcgccaattccagtgcctcagtccctgatctcgaccgcaacgaagaaatgatggcgtatgtctcgggcgatatgcaagggaccagcgacggcagctggatatggcacgggtccgagacggggtctcaattggaggggatgggggccccgatgcctacaacctcctcgaactatcggacggagatggatacggatacagattgggaggggtggacgtggatcgagcagtctataggcgttctctttcaggaacagaaacggcagcaggaggagaattacaaggcttctcttgggtcggattcggcttctggtaggtcgagttcggcgcattcacgaatgacgattgctagcatcatttgaacgcatctcactacatcgctccatcggcgtgtatgtgtatggctctagacaagtctagagctcgaaactttatatgggcactgtcacttgcctttatatcctccttgcaaatattgcattgccgatacccatgcccaagtacttgtttacagcctttgttttttatgtatatatctcacgaacggatcggatttcgaccgtttcagtttgcatttgcatgtcttttacttattagcttgatgaaacactgcgcctcaacatatcgacgaagcctgcgacatccaagtctactttgcttgtcggtgaccttgctctttatctcgatgattggattcaacacactatcttcaggaaagctatatacccaatgaccgaatatatttccttttcgaatttctatttcaacttctgtgttctttctctcttcttgtgtcaggtatctgacggtagactgcatattcaggctagtttaacatgggctggtgtattggactgggtgctgtgatacatagagtactgtaatgtactcgagttctttcaccaatctggtgtggacgagtgagaaagaggatcaggctttctcaagtaatattgtgcataggtgcagagataccacgcaataatagagacaaatatgttaagaatgaatttccaaaaaagagggtgacaactcccatgccagtaccctatgcctaggccacgccagccgacataggttggaatgcatatgtttataatcgcggacccagcagatcgaacgccggcagccggagctacctgcatgtttaatccgctaagccactgggggggagggtcgaagaacaagtgttcgtctttaatttataggaaggaacctggggaaacatgcttccgaaaagggaaggtgggtctgtcacatgttgatgcctgaatatgtatccgtttctgcctgattatcatgatacccattgctctttccgaatacattcgaaatgagaaggaaagagcatttcaatggcagctgaggcattttttactgagtgatcgaccccatagaggatcaagtgcagcccgtggggttatggctaatatatacagaatcattatcaacctgtgtaagctcacccaggtgtgaagttactcatgcaaaaatccgtgtctgaaattgttagattgaactatataaggctagaaggcaaatgatgaccttgcggaagaaaagaatctatataagactgaatctatcaacgactgtacaaccacaccccagctgggcaactagctgcttatttccttactcaatagtaagtcacctcgtctccatacaaagtggatccagtgccaggctgcttcacgataccagcttccaccaactcattgatcaggttgaagaccatcagatcacagccgtgaggtgcgaggaaatccaccgcgacaggcagatattcctgcttcagggtaatggtggagttgtacagcgcttggccgactaaattataattgtcattagttatacagtccttgttcaagtaatatttgggttagcatacttggaacgaccatatcgggcacaccagcgaagttggcgatacgagatgtaccgaatcctgccgggacacctggcatgctatatgatacaatggattagcaaacagtccatcaaatatcctagagtgtcagaaaggacaagcacatacctccggtaaacattgcggtaggttggtgtcgcttccgctccaatgtaaagaatcaggctgtctgagcaagtctcctcgtcgaatacctgggcagttgtgttccaccaggtggtgaatatgttcttgtgctcaatttcggtctccagttgcgagtccgggtatccaagtccccaattccaacgggacagaggcacggggttgataaagggcttgcgacctccattggcagccgcgtagtctgcatacagcggtgcgccaatgaggggatactgctgcttcgaaatgaggatagggtaagtgagaggcaacatggtgtcgagggtcgcattggcggcaacagtcgaaggcttagtggattcccagagagcatcgtaatcaaatgcagaaacattcgcaccacccaagaaggacgacagcttgtcgacgaaatcaatcaaaaggccctcagctagggtcgatgcattagttgggaactggatcgtcttgatagactttgggtacttggtgtaggacttcaggcctgcatccttgtacatcacctccgcagcagtgcgccacagctgcacatctcttgtcaagaatccggcggtgtccaaaagcggggacatgggcataacattatccaaggagaccaagttccacgagggtctgttgccgaagcatccattcacctgtgaagggttgcgaattgagcctccggtatcacttccaattgccaaatccaaccagtcataagatccaataccggaaccaggaccggacgaagatgagctaggatcttggtatccgtcaccgcgggcgttgaagggggagtggtagtcgacccaatcatcagtggcgctctcaccgttggcaaactgactggtcttcatctttccgacgatgatggcgcccgcatcaatgagggattgaactgcagggccagtagcgttagcggctgggtacgtttcatagtaagcgcggttgccacagccggttttgacgcccttgatatcataaatatctttaacacccagacgaacctatgagtggaagatagtcagtattgcattctcttgcataatagacgagtggaatacatacaccagccaaaggcttatcggctgtcttggtataatacagccgcgaaggaacaccaatggtcaacgacgcatagccctgcaagcttgccggcaaaacatcatatgtattatcaccaacagagaccaatccctgggtgaaagagcccataacatcggaatacaaccgataagcttcaaaaacggctccactggatggatccaagaaatatggaccagcaggcaggggcgatgaagaggtcaatgtctttgatttcttggtatcatatgcagatgcataccccaagattttagggccccacgaggaatgggttgacacattctccgagggacgcttggaggtaccgttatactggacgtagatgttgtcgaggaagccagtgttgaagacatcgtcagcagactcgtagctgcttaccaaggaatcaaggatcgagcttgtcagcttcacggcatcgctccgaatgaccgtcagaggctgcaagccattgagtttgctgaacacgtgcgaatcggctttcagggtagctactactgtaggaggaatataatagttgtttccattgagctccacggtctgacccttcgaggtgattgtcgcgatggcggtggtggaaagtgacagcagggccgacaacagagccggtagcccataggaactaggaggagcgaccatgatgatcagctaaagattgatagtcttcaaaaggtacttttatcaaaagccgggacattatctgccatatatatacgttccactaccgcttattatttgtctcagttgttgcattgctatcgaggacttccagtgataaggatctagcgaaaaggtgaccaatttagggtaccggactttactggatcaaaatggactagccaggagattaattctcttagtacaatatacatctcttatctttcccagagctatttccgcaattcactgataagtcgagtcacagttggaggtttcatagtcgccattggctcggggaaacaagcttaccccaataagatccacacccacgttttcgtggctagtatgtagcattttgtgaattttgtacctttcgtaccttttgtaccttttgcatactgatgccatatgaaagatacccgatcggaaactccatgatcgagggagaggttatgattgactgggcgtaccaaaccctcttggcacgatcacgctacaacttttgcgttcgggaatccgatcgtatccggtgctatctatctacctgcctgttttgcaggcagatccagccacaatcatagctcttagtcttctagaaaccgattgtgacattcgatgggggcatgggctatcaggcattagtattttgctagcgttccttagttcaggaacaccctcctttcagtacaaacaaccccgcgtctaaatattctgccgcccctaactgaaagttgaattaccgccttcctaatctgttgcgactatagattctgtatagattctcacttctatcttcaaaaaccctgcattttaatcgcaatgttttacctaattcctagaaagttaggtcatatgaccaagttttctatcacttggatgctagaatcatagctttttaatgtcccatcatatgaccacgtccacctttctctatcattatggcattcaaaacatatactagatacggtcactcgcgtccttcggagctatttcgctcacgcgctggcaaccgagatgtcaaaaagagagagggggaagaatagaagatacgtggaggggaggaaaataaatgacgtatggagagttatttactacgacgtggcatcgcactaactggaggcctaaggtcaccgagattcctagtattttcttgaatccttagactccatctattctatcacaaaaatcgcgcatccctcgatgagactactaacttagcaaggtcaaaggatcaagctaatgccatggtaacactaagtcacgtagatcgacggcccgatccatacctgagcgatgatacaccaaccctggatctctacggaagagtggagagtggattaagttccccactgagactctggcgatgtccaggtacatttctccatgcactagcagggatgcagggtatctattttgggaataggcagatgcatttatcgcagtttttcgaggaatcagagaagtttataagaatcgaagatccgcactagcacccgtagccttcgaagcgtccaacccagtctatcaaactcgttctctccgatcgataggttattctctcagaatgatggcactcgtgacatccctggatacacttatgtgctcgatcagcactttcatcctcgactcactgcatgctgcgcctttccaaactttcgccatcttcctcctccttcagttccttctcgccccgaccgtcatagccttggtgtgcagatggtgcggcctagcacctggcacagacaacgagtcgcaaaggacttgcccaacgtgcgacggaagcggggttgttgatgtgacgcaagacaaatcatcacagaccgaagcttactgaattttgagattcaaatcttctattcttgagtcaagcgaaatttagcgaaaattagacgcagccaatctagacgattcatccacaaggacaagactgatctattgtatcaatacattcccaactcgaaatatgctttctgtttatcgcgctttctagtcatgttgagggctgtcattcatgtctttatccactgctctgagaaacaggatatataacgaatttccttgtcttttttgtttcaaacgtaaagccaggccctctcgtatctatgtgcgctttctttcctgcatacttcccgttatgaaattgagtaagtattttcggatcatgggcagctacttcggtattcccttttctattcttgaatcataggtcctggcgggtctttacataagaaccaagtgagagtaatagttaaatatggccacgggtacttgcataccgttagatcagaatttattttgtctgaatagaatcgctgtgttgatttgttgataagcctcggccacgcataccacacggagcagtagtgaattcaggtttccctagatgagcctccgagaggggtcacagattttagctgcggttctacatccaatcctccttgaactcactcattgatcaattgtctcttccaaggtgaatccaacttcttgaccgtcgttatttgtattttgcttgcctgtcctgcatctctactactgccatccgttagttgcgttggataatcgttggtatactggctactccatacgaggctgtttggactacctctagacagaccctactccggactaatgcgactgacgtctcatggctatggaaggtagtagcagcctgcttttcagcggtacagctaatcgggtgagttaggcatcaagagatgtgagcttgacttgagaatcgggggtctctgactatagttggagtagatatatgatgctggctgtggtagtcggtttccttccccatgagttgcgaatcaatgctacagcatctactgttactgcatttgtgtttgttggtacatcttatgatgtatccgccttgattgccttcgcccagcgccatcaaacgatgttcctcctccactcaatcttcatgtaggtatcaatgaaagcggcgtctctcgatcggccacgggctaacaattgcagcccatactcgacgatgaatatgctcgcgctcctgaatatcctgttccacatccacgggcgaagcctgcagacgaataccttgcagattgtaaacatctgcctacccactgctttctcggcgtgttacgctcttgcgggggtcttgatataccgagagtacggatttcaccgagtggaggaagacatgccgctactcactgacgaagagatgcaacgtcgccagttgcttcgtttgttaggggaacggaataccagcgcaccatcgcccgatcttgtgcgaaacacttatcgctttgatttaccggatgaaacagcacaaaaggactggagtcgtttgactccttgaagtatgctatagcgtaggaaatatcggatgtatatgaaaagaaatgaatgtgaaatgtgaatgtgatcgaataatgtattatttcttgcatgtgtagctgcacaatgtgtacaatccgatgtagaaacccccggtcgatcacttggacctcggctttttttccgccggtcgaccgcatttaaacgtccaggaaaccatcatccctgaaatccaccgggacatttaacctcttgtcattgatctctcctgaaaacaaatatgtcaaaacgcgtgacacttttcgacccgcccgcgcaggatcattccaaagctctcatcgagaatgtactcgatctaacgccagtggcggacctcggcccagtatggcatccctcaatctttcgcgaatggtcatattctaacagagaactctcggtctaggatgtcttcaccaatacccgcccgctatggcacccccccggagctcggggcatctacggcggtgccgcgattgcgcagtccctatcagcagccatgttgaccgtccccgccgactacgccgtccacagcatgcactgctactttgtacttgccggagactccgagatcccaattctataccatgtcgagcgggtacgcgatgggaggagctttgtgacccgaaccgtgcaggcgcggcaacgggggcgaccgatcttcaccaccacgctgagcttcagccgggtcggcagcggtggcaagaagaccgttcaccacgccgtaccgaagccaaacgtcccactgccagaagaggccgagccgggcagtttggaagctctcagccatgcaggcagcggtccgtttgaatcaaggaaagcgggaattttgaaccgtacgtctttcggaagcggcatgctgtgcgcgttgtactaatggatgtcgaaattaaataggcacatcccccaacccagaagataagaaggtccggcgacacattcgcgcccgcggcgcaatctccgaacagggtggttaccaagcacacctgtcggcgctggcctatatcaccgacagctatttcatcggtaccatctccctcgttcacgatattccgcgattttcctctccggccgagctcgagaagcttttgaacgcacttaagaacccgtctgatctcgacgatgaggatatcacgcgagctctgaaggagttgaaagaagaggaggctgcggaattgcgccgtcgtttggagggggctttgaacagggccacgaatggcataaaggaggtagatcacaaggaggttggaatgatggtcagcctggaccactcaatttacttccacaatccccgtgcattccgtgccgatgagtggatgttgacggagatggagagtccgtgggctggcgaaggacgaggcttggcaattcagcagatctggtctaaggatggactgcttattgctacttgcatgcaagaggtatgtattcgtttttctattctggagcttagtgctaactcgatcatagggtgttgtgcgattaaagcaagacgacccgccaaagtcgaagatttaagagcttgtgctataccctaccttgaaggagttctctcctatcattttccattcttttacatatcttcacttatagatttgggcttcgtcccctcgactttctctggttttcttgaattgaagctggacattcttagttatagcttcaccgcacgagcatattataattcaatagaacaattgtctcttgtcttcgccgaattacccaaacagtctccctaattaacaaacccaaaacatttgaacgcaagaaacgcgaaagtagaaaacacacaaaacaacttttgcgtgaaacaaaaagccgacccaattttgatcttccagagccaaaatgcgaaacagaaaacaaagatatcctatatagtacaaacctcacctttctcactttcctgattatttcccgtcttttcaccctcaacccgtttgcgatagtattccaaaaccttagcgccccaaacatctctccccttatactcacccacataatcaggccaacttttcatctccttggccagattatccagctcagccattggcagctcatccaacggcgtgagatacgtcttgacaccaaagacgatcgcccccgtgcgcggcagacgacggaaagtctgtctctcgcgacggatcaggatatctgatggcgatgggctgctcagctttttctcgcagagggagttgggccgatagaggatgtcggtcaggttctcgtttggctccttgacttctacaaagtaatttgagcgttccattggagatgttggggttaagcgggcgaggaatctggggagtagggtcagtttcttgtttcttgtttctctgtatggccgtcccctctgatctgatttgaggttacttacttgctgacggagttggcgacttgttggtgccatagtggaacagggccatgcagctgagagatggtccagccaattctctgatttactgtccaccccgttgggaagaggctggcgctagctgccctgtgttggtgttagggttggtaaattgagtattatgcggatttgaacatacaggtagaattccccttcctcgttcatgatcagaatactgagatcctccatcgtaagacgcacagcggcctcgagtgcctcggttgatccctcgttggggtcgcgcccgctgacagtaaatttatcgcctgtcatgcgattatcgacgacctttcggccattttgaattgagatttcgaacatatttgggaatctctcgcagagaaagtccgaaacttcctccaatgcctcttggcacggttcaattgactcgggcagacagcgaatgacttcttctcttttctcatgaagcaattgggtccggacccggtgttcgtccatatagttcttatccagggtgagccaattctgggcgtcgagtttgcgaatgtccatcattacacggtatcgctctctgcctttgatgggctgcgctgggtatggtgccatacgcttgacgtcggattggttggagacatttttggagcaatgtttccctttcaatttttgtgatagccactggagcaattgtctttggtgtctcactgcgaaaagaaagacgaagattggaatcgcaactagtgagaaggtggccatactttttctcattaaggctccacgtatagatcgaactgttttcttctggagataaaactaatcaagaacgctcaatgtcaaaggaaggcaaagcgaaatagaaaataaggtgaatatcatagactatgaccaagactagaatatataaatataatttcaagacgggctatgaagtcaccatcggaaacaggcaacaatagaagatcaccagactataattctaagtcagcttcactagtcttagccaaaaaaaaaggttagctcccaggtatggcagctgcattccacatgccccattcagcgaagttgtgcctgcggaactgctgtgatacgcccagggattccccgcaaaaaaaaagtcagagttcaccggggagtactgccagccacatgatctcaggccttttttgaaaatcatgatatttgtctgatttttcaaaagtacatcagggctgtgcataaacaatcagctctgagtgttgccggagtggggatgattacaaccaaaccatctctcactggtcgatgatatctcccttaccagtcggacaagagcgcttggagacgactcggcccatagtttctcggaccaactccctagctagggcccctacgatctagacacagagtgccgtctttaacttcaaacaatcgtcaagctcgtataccgcccgtgcgcctcatgaaccagccgcccagggcttgccgactcggaagaaaaaactagtctcgcacgaaagaatttactatgtaggctccggatatcatcggagaggcaatgtccaggagttgatttgaaccgcgtaaggcgcttgccagctaatgtttgtgtccgtacccaaactccgagagtaccggcatgtttggtctggggtcacgcaggtccggccccagctattaataatttgccgtcttggaagagtctacggagtacggagtacggagtactagcatattgggtctgagtggcccggggatgagccggggattcgttccagttcaggtgcacattacctccgagctaggtagatgggcacatggagtttagtctgacgtatcatcgtcatgcctctcgtgggtggagtggatatcaaggggctttttttgcctttcttctccaacgggtccggactctttcgtcacatccgccccgatttaaagattctaggattactggacctcggttttccttggcttcaggttggaagaaagccattgcatcgaatcagacaccgagaataactacactaacacacactaacacactaacactaaaaataaacacaataaaagaagactaaaacagaattttcaagtaaatgctgtcgcaccatgccacaatttaccaacatacccttttaagaggctccacagactccatctggggttcccgctgcaaccgcacatcccccctttcgcgcaaagcgcgtttgccgatattattcttatagtttgggccggaccctcctacaggagtacgcaagttcgttccatttcccgggtctcggctttgattcttgacatgaagattttcctattagctttttattttcgccttctccgtcatagcttcgaagccctaatgcccctgtcgctattccgacaggctattataaccatgattggatcttcaaagcataaatatttgccaccgcttatgatcttcgcaacttgtttgcgcatttcattcctaactacctcgtagacgagtgcgaaatgctgttcatagtattacatgcctcgtactccgcatataatccttttgtttgttacggagtactccgtactccgtacataaactagttcctaatccagtacgtccacacgggccaatcaatgcctccagctagacttgatctaagacctgtgtagagtctggaccgggcccagtctggacctcgactgcatcttccaatcctggaatccttgaaccgttcatcctggatatggatcacagcaattaaagtacaaaccaatgcaaggcgacgggggatatgacaatcgccccgtcaggtcggcaaagccgatttcctttcttttttcttctctcacgcacagacgtttagatcacctgccgttgttctcgctggttgggttgtatattccaaggtggatctcccgtctacccgggtgcctttattttttgcattagtagcgctccagccgagaaaaacatatatttagttaggacttgtctttgccccttttcgagctattacgacttctttgtgcaagcttatgaaataatgatcaatcataagtaaccacggagtacggagtacggagtagaacacggagtgtgccaagcccaccaacacggaattgggcgctaaacccaaaatggaaaacaactaaaaagggaaattcgaaggtccggattacaattatacatgtagaatttgatcaactagagcttcgataaaggcgcagtttgtatcttatttcttactccgagctcgtgtgataaggatctagactgaagcgtagacttgccatggaatttgtcaagccatcttgtggcactgcaatgaatccacgttttcgcaccattctcgcggatagatgggtgacattggtgtcgtcaatagatgcctatcctcgactaaaggaaaatatcaatgtacttctgccaatgacaagttatcgagaaccgtaattagtcaaaaatgaaatcaatctgacctgcgtgactgccatacctccctattcggtccacgacaatggacatttgtccagacttaaaagtagagatacattgcataggaccagtgacgaggactttgaataactggctgatgtctcgttgacctgcaggtttccaaaacaggaccatcgcaggtcaggatgctgagtagacctagcgtcatcttcacttggcagacagtcttatgcttctcaatcgagcaatagcccataaataagtctcaatgagggtgaacgcaatcaggataactgcaaagcccgtgacaatatagtccaatagcatctttagctagcactgtaagtagagaagaaggtagaaaggctttggagataggtctaaggctttctttcaaaagaggaaatgtacacatatacgtataaaaagttgctcagagaacaaatggagttccaaattcatctcggtgtattataatctgtgactatcttcttggtaagccgattcatcttccaatgggattaagagagaaaaagagaggttcggaacttttgtcccgagtcagatgaaaacttacgttctcattcaatcgccctaacaaagacaaaagtacttgtttagtggggtgatatctgtccaatctcatgtttgacacaaatcctacaacactcttagaagcacaatctaccctagattctattgcacaactctagcaaaacctctattctacatagagtacagatattcagtgtatcgcttgagatagaagatgtttccacagagctgaagcgagaagataaaagcctgaggatggatttccgagctagggttacatatcacggcgttgaaagtgctgatcctcctgctacaagtccagtcacttttcacaccagtatctttcacgatgacaacttacaggttgtattatcgtcgtcgtgatgaagatagactgtgggaatactgttgaccttgcaacatgtgtctactatttgtggacgagaaagatgtttaagttaatgttgccgctagtgaagactttgtcagtctccgacctggcgaaagcttgattgtgatagtttagctcgatgatgacatctggacttttcctagtgatctatagctaggggatgtattccggtttgcgttcaatggtaccacggtagattggtgggattggggtagcaagaaccagacccatactcagacggtggtgaccacgagtacttacgtttccagcagagtcattgacccagctgataataatggcaagcctgaaatagtggtgcctccttccaaccaggtcgagtttacttttgccgtttagatgtattatatctacaaatctaggcagaaggttaccaaatttgcatgaatcaacttggccatcaaattaagtggttcgtacaggacaaaagataagatgtatgacactgtcatctgacataaattaagccagccacctgtgataggtggcgggtgaacaaaaagtgtaccgccaaggttgttgttcaccaggatgggcgttgtgcaaattagttctcgctgaatgttggtcagttcatcgatatctcctatgttgccagatggtcgaagcttgacctgccctaaattggcctgacaaaattcattcatatattttacgaaccgcttctgaacacctgggtttaatgtaagcgggtagagatcagtcataagagggaaaatacctatcgtacctttgggtacctttttgtggttagttgaaacgagctcgggagctttgacaccgctgaataggttgatgctcacctctaacacctgcttcctatcagttggaatgccttgagtaaattccagacccccttccataacggagattaggtcctcaatcattctttgggccataacttgatcatttttcaatgcgccactatcaaagccgggcagattcccaaagagtcatggtgtaccgtcgttgatgaagatgtcaaagtgtggagatatcaaaaggcgaaggtgtcaaaaggtgaagctgtcgtggttgaattcgaaggtttctcgaatagctatccttaattggtatgggaatatgtatatggctttgtttttgacgaatctggatgtatctttcgggcgtattcgagatatctctagggctatatacctagctaatacctatcaagcaccatgccatgctagcattgacttttgtggctattctctttgtattgtttcaggtctgctgcgagcacgcaattctacctaagccagttatcattaagtgaagacggacttcttatcgagatattagaaggctaattacttctaaggttgaggaggctactagaagattaagtcgttacccaaccttttaggtgtcggatcttgggaggtgtaagctgacatcactatggataaattttattagaccaagcaaaaacctttaagaaacatccttcaccctcaaattcagataatacgtttaaatatcagagatgccattttctttcccccgtcgtaaaagagaaccgagccgggatcgagtacatagaaaagtcggaatcatgaggggcgataaagacagttgggaagtcggtctcgaacgatctggggagataaatattctccaaagatatcgcttaagtgaatactggacgctgatcagaagagataacactgggcctccttttatctcacataagcttctctttgtagaggaagacctccgggaaatttttcaagaggagatatctatcaaagagggagccgacttgaacaaagatgccaaagagagacttgatgctttaaatgccagatactggctcttagagcaaaagtgctggcattatcattcctgtctggcagatgggtatcagctaagagcgtttgagctatggcggtcccatcccaaatggtatatgcaccgcgtgcttgttgaagattgtgctagccggcatggctgtgctcgtggatgtgggtgttgtcttagccgcaatattgatcccacgcgccgtcttggagttggacattgtacttttgaatgcggatgttatcgcagagctcgaggctttgacgtttctgaagaagacaaaaaattgctgaaagaacagtgccgcgaagaaataagcaaacttactaagcaccggatcacgcgagtcgccatataggggcttgtcggtgatagctatgagagcccgtttgatatgattgatgcaccaccaagctacgagcagattgcgaaagacaaggcttccacaaaaaagaaggataagactcgctgactggcttcaatcatggatattgctgcatcttgctcactatactgttgctgtgtacctacccgattaagctcttacatcacattgcaggctcataccttccctacaagccattgcttcccccgtagtctacaaaacaatcttgtagcacacgtaagaaattcaccttcacatcattttgctacataatagctatcttcaagatgactctgttaagccttttgttattgtcttgtttgactctttccttcgccggtaagtttgatctcttttcgggcgtctttccaggcgtcttttcagctgtctcttcagctgtcttttttggccactttctgacatttattttttagctcccgtcccgctgcgcccccgggacagcgaggagagccttgccatccttgaatgacggccaccgcgcgtgacgtcctgtggctcgtcgtggccttcctcctggccgtaaaggccatcaacttcctgttctggtgggccaagcgggaggtgaaactgtatgtcaattggtcgcaccgtaggctgtagaaacaatatgctgaccgttgatgtagctagcgactcaagaaggaggagcagcccaagaatgaatgagaaggggggggnnnnnnnnnnnnnnnnnnnnnnnnnnnnnnnnnnnnnnnnnnnnnnnnnnnnnnnnnnnnnnnnnnnnnnnnnnnnnnnnnnnnnnnnnnnnnnnnnnnnnnnnnnnnnnnnnnnnnnnnnnnnnnnnnnnnnnnnnnnnnnnnnnnnnnnnnnnnnnnnnnnnnnnnnnnnnnnnnnnnnnnnnnnnnnnnnnnnnnnnnnnnnnnnnnnnnnnnnnnggggggggcatgtgaagggaagggagggggggcccccgggggagtggaggtatttatattttttgatattgtatataccaacctggccttgtaaatatgatgcgactacagtgtagtgatgtaaattgatagagggagagagttgtcaattcctaaagggcagaatgcccgactatctagttggtacctgccgtactgggctgatggtcaggtgaccaccatgtccaatacacccccctaggtataatcccgaggaatgcactcatctgttgttatcgtttttttttttttattgggcagaaactatatcatctagtataagttgacacggtgagcgggccgccagaaacggctcccattgcaccaccctcctgccatcctcgaccgcctgcccgtctccgccatagccttgccccttcgggtttggcgccctcatcttgtccccctttggtttagccccgtccctggccgcttttaccgccccggccatctgccatgcatctatataacaccgctcgccctctcccctcaacttgtcgacgcactttcccttctctttccctctctaccccctttctttctcgccctttctcgcccccaccctcgcctgcggattggctttcagcccgatgcactgcccctttcattttaccggagatgccgctctatccgacgctcagctcgttctggtcggcatgggctgccgtgccatccagtcgcccaggagcagaacccctgggatgatccagcccgcagccgcatcgttcggtcttgagtcgatactccctcttccttctttcctaggggagtggcagtgcatcgtgctacgaagctatctaggtcgccttctctgctagagcgctttgctcgttgagcgtcactcatttcaccggcctctatcgcatctgcaaagctctggcatactatcttcgatgccgtaagccccgctccattcgccccatctgaggttacattgcacagcccctattgtcgcagcacgactctccgttgcctcgtcgcgaatcccgtggcgcccagttgtcgtcatcatcggtctctccggtctctccgcatccaatcgatgaattccgaaagcacagcgcagcgatatgggccaatagcaagaatgcctcgcacgcgcctgacctcggtcgacgatacatcatacggccaataccggacctcgactgcggaaaccgcaccatgatcacacctttacctaccaaatagagaacgggccgacgactagtgtagggcatgcatcgcaaaggtcgtccgcaaggaagagtagtggtaacttttgccggtaagctacaacccttggttatgaaactggtgtggtcccgcgtcttagatgcagtggcctggatttcaggagccggtcgggatcttctacgctgtggagaaagcagattccgcctcacgggcgaccgtcgtctataaagagactacagttccacccaaatggcaaaactgtaattcaaaaccccttcaaattctcctctcccctacaccctgccccccatcccctatcccccatcccctatccccgatcccctatcccccatccccagttctctattctctgccagtttccctgttttaggactacccacaaccaccacatctcgaagactgtctccgccaattcttccacacaatatgtcaaacactagttttcgcctggaatcctttcggccatggaatcctttccaggactctcccgatatttgccgctacccaattcctgtatcgatgaccgccaccctccctgtcttcaatcccgtctcaaagagtcaagaaagtcatccctataaacctggccagcatccacttcctgcgcgacccccgttggaggtttgcttgaatggcagtctacattcggacgctcaaacaactcgacacgagccggaggatttgggctgcaccaccttccgtcctcatgctgagactttcgactctgaaggcatatcgcaattgcaagatataccaggcaccaaagaccttgcttctaccacaatgcccgatattaattgtctgggtgctaagcatcgatcccccggttttggatcgtgcgacttggagcctgccgttattactgggcagcaccagcaagctgtcgattccggaaaccctacccagactggagagcttccagaccctgaaacaatcgatcccgcaatcctagacgatcatgtctttccaggtgatgagcagacccaagcaacggaaaatatccccggcatcgcaacatgtccaaacagatgtctcttggagtgctcccactctccgaaccaagatccacctcttgaatccagacgacaaaatgcaaagggaacggctgttcctggtcgtcggtccaaagtaaataaacgtttgagtgctaggaagagatcttcaaaacaaaatgctggtcagtctaataaagggcctccttgtcgcagcagcatttcgtttcttgccgttcgtgctcaattttcggcccttcccgtcgaagaccggctagagttcctgtcctggttgtttgagagtgctttacctcgttgtatttctacgccttcgagcagagataccactgtatcaagatacatcgcaaaccaagattcagacatcacatacgactgtgaccagccaagcccaaatatcgaaccagttgatgctcaacatacttcttgtacgagaaaaggtttaccgtggtccgtggaagaaagatctttattggtgaagctcagggaagaacagaatcttgcttggtcggaggtgacgagacagtttgcacagaaattcgccgggagaagtcaagggtccatacaggtgtactggagcacgacgctcaaaaaagagcggcgatctttggtggctgccacgtagaaaatgccatcctaatcgatacttagaccattccctcgttttctcatgcaccacaaaccacaacgtaaataaattgaggactgtgaattcaacaatgtagttgagtattggtggtccaagtacacagttccacactacggtacagcgcttccggaaactggtgtcactgcaattcgtgccaaattctcggccctttcagtcgaaaactgactgcagttcctatcctagcttttcgagggtgcgtgaactcattgcgcttctacgccctagagcatcgatgctgcttctccatcaagccagcgtgacgacataaccgacggctgtggtcctgcgagcttggacactggggtatttgatgcgcagcatacctcaagaaagggactacggtggtcggtagaggaagatcactctctaatgaagctaagagacgagcaaaacctcgcttggtctgaggtggtcaagcaattttcacgagaattccccaggcagagcgaggggtcaataaaagtgtactggagcacagcaatgaagaaaagacggccatcttaccccattgttctcattgcttgacatagttaatcaatattgagatgctaacgtaattcacccccaagcggcgcaccccatccaacctattgaatttaagtgcatatatttcaaccagaacgccattaaattaattaaactaaaaagaatcatttatctggacacctattgatcttatgcccggttcttccacacccactacactttgatgcagcccgtggacgtggttctacccccggttgagggcttccgcgcgtggggggggggaggtgcttcagatgcttccaccaactcagtaatcaattgagaagcttcctgaacagagaggccttcatcggcaggtatctgcctccgggatctagtactttttgcttttgcttctcgttggcagcgcgtaattcgcttacttctttctcaagaaaagcggcagattgcatggtaatctggcaggcttttaaaacctggttaattgccgaactaagcgggctcggagggcttcttgatctcatccgaagcaatgctttaatagacgaagcttgcttttgtaattgaatgtagtttgatggcgtttttgggtcccaatcgctatcccggcttaggggggggggtaggtgttcgaagacaaatattcagctttgaaagtacccgatcgggtgaaaaaggtattaaaccggctgctgagaagctatttttaatcgtctccgatttaaaagcttcaattcgtgcagaggggtatgcttcgaggaagtcatgtttatcaatatggttgatcctggtccgcatttgcatctcaaccaaccggccgtacgaccgttttaccaccgcaaaacaaccaatatcaagtggttgtaaaaggtgagatgaatgcggtggcatacaaattggtatgatcttgttttgcacacaaatctcatcgaattttggggttaaatggcttccgtggccgtcgagtactaaaagccgatatacccccttcatacgagaagaagtagctggaataaagagcttttgtagccaacgaaggcctatttcatctaacgtccacccatttggactaacttcaaagcgccagtcgccaggaaggccttcaaaccatgattcaaggaagaccttgcctttgaaaataatacacggagggagggcccaccccgctgcatttagacattcaattgtagttacccactcgcgatttccaggttataaaagtgatctccgaccgtagtattcacttcttgttataacccttaccgttgcagttaatcccattgcgaaaccagtctcgtcgaagttataaacatcgtcagggttgattccaaattaaaggatagttttttgaacgagattaaaccactctccaataatcttcggatcttcatacttcgcgcgctcgtaattatagcgtctcgagaatcgggaggaaaggagagggtgccgttttatgaattttgtaacccaattttggccaaccgaaagaactagggtagttccacgctttttgaggagaagatccgccatttctcgtaccatagagtgtcacgattggcacttgcggaagtcgtaccttcccgtttgtttgtacaagaagtcgtactttccttccagggtaagcgaggatagggctatgcccccaaagagtataaagaccccacagatgctttacgtttgttttcttttcttttccttcttcatacttgatatttcagttagaaatgcacttctttatttgaaagaacctggcaggtaacatagagggccgcggggctgctccacaagaatccatagagagaatccatttttcaagtgattcctcttcaatttgtgtcaatttacgtgaattggcgcgagaaatcgcgaggttttgtatcccactaaggcagcggcggagggtagtttcgggtacatcaaaacggcgcgctacttcacgaattgaagagatttcttgattcttaaaagcctggatagctagtaagatcctaccctcttgctctactgaatctttagaggannnnnnnnnnnnnnnnnnnnnnnnnnnnnnnnnnnnnnnnnnnnnnnnnnnnnnnnnnnnnnnnnnnnnnnnnnnnnnnnnnnnnnnnnnnnnnnnnnnnnnnnnnnnnnnnnnnnnnnnnnnnnnnnnnnnnnnnnnnnnnnnnnnnnnnnnnnnnnnnnnnnnnnnnnnnnnnnnnnnnnnnnnnnnnnnnnnnnnnnnnnnnnnnnnnnnnnnnnnnnnnnnnnnnnnnnnnnnnnnnnnnnnnnnnnnnnnnnnnnnnnnnnnnnnnnnnnnnnnnnnnnnnnnnnnnnnnnnnnnnnnnnnnnnnnnnnnnnnnnnnnnnnnnnnnnnnnnnnnnnnnnnnnnnnnnnnnnnnnnnnnnnnnnnnnnnnnnnnnnnnnnnnnnnnnnnnnnnnnnnnnnnnnnnnnnnnnnnnnnnnnnnnnnnnnnnnnnnnnnnnnnnnnnnnnnnnnnnnnnnnnnnnnnnnnnnnnnnnnnnnnnnnnnnnnnnnnnnnnnnnnnnnnnnnnnnnnnnnnnnnnnnnnnnnnnnnnnnnnnnnnnnnnnnnnnnnnnnnnnnnnnnnnnnnnnnnnnnnnnnnnnnnnnnnnnnnnnnnnnnnnnnnnnnnnnnnnnnnnnnnnnnnnnnnnnnnnnnnnnnnnnnnnnnnnnnnnnnnnnnnnnnnnnnnnnnnnnnnnnnnnnnnnnnnnnnnnnnnnnnnnnnnnnnnnnnnnnnnnnnnnnnnnnnnnnnnnnnnnnnnnnnnnnnnnnnnnnnnnnnnnnnnnnnnnnnnnnnnnnnnnnnnnnnnnnnnnnnnnnnnnnnnnnnnnnnnnnnnnnnnnnnnnnnnnnnnnnnnnnnnnnnnnnnnnnnnnnnnnnnnnnnnnnnnnnnnnnnnnnnnnnnnnnnnnnnnnnnnnnnnnnnnnnnnnnnnnnnnnnnnnnnnnnnnnnnnnnnnnnnnnnnnnnnnnnnnnnnnnnnnnnnnnnnnnnnnnnnnnnnnnnnnnnnnnnnnnnnnnnnnnnnnnnnnnnnnnnnnnnnnnnnnnnnnnnnnnnnnnnnnnnnnnnnnnnnnnnnnnnnnnnnnnnnnnnnnnnnnnnnnnnnnnnnnnnnnnnnnnnnnnnnnnnnnnnnnnnnnnnnnnnnnnnnnnnnnnnnnnnnnnnnnnnnnnnnnnnnnnnnnnnnnnnnnnnnnnnnnnnnnnnnnnnnnnnnnnnnnnnnnnnnnnnnnnnnnnnnnnnnnnnnnnnnnnnnnnnnnnnnnnnnnnnnnnnnnnnnnnnnnnnnnnnnnnnnnnnnnnnnnnnnnnnnnnnnnnnnnnnnnnnnnnnnnnnnnnnnnnnnnnnnnnnnnnnnnnnnnnnnnnnnnnnnnnnnnnnnnnnnnnnnnnnnnnnnnnnnnnnnnnnnnnnnnnnnnnnnnnnnnnnnnnnnnnnnnnnnnnnnnnnnnnnnnnnnnnnnnnnnnnnnnnnnnnnnnnnnnnnnnnnnnnnnnnnnnnnnnnnnnnnnnnnnnnnnnnnnnnnnnnnnnnnnnnnnnnnnnnnnnnnnnnnnnnnnnnnnnnnnnnnnnnnnnnnnnnnnnnnnnnnnnnnnnnnnnnnnnnnnnnnnnnnnnnnnnnnnnnnnnnnnnnnnnnnnnnnnnnnnnnnnnnnnnnnnnnnnnnnnnnnnnnnnnnnnnnnnnnnnnnnnnnnnnnnnnnnnnnnnnnnnnnnnnnnnnnnnnnnngccaactcagtaatcaattgagaagcttcctgaacagagaggccttcatcggcaggtatctgcctccgggatctagtactttttgcttttgcttctcgttggcagcgcgtaattcgcttacttctttctcaagaaaagcggcagattgcatggtaatctggcaggcttttaaaacctggttaattgccgaactaagcgggctcggagggcttcttgatctcatccgaagcaatgctttaatagacgaagcttgcttttgtaattgaatgtagtttgatggcgtttttgggtcccaatcgctatcccggcttaggggggggggtaggtgttcgaagacaaatattcagctttgaaagtacccgatcgggtgaaaaaggtattaaaccggctgctgagaagctatttttaatcgtctccgatttaaaagcttcaattcgtgcagaggggtatgcttcgaggaagtcatgtttatcaatatggttgatcctggtccgcatttgcatctcaaccaaccggccgtacgaccgttttaccaccgcaaaacaaccaatatcaagtggttgtaaaaggtgagatgaatgcggtggcatacaaattggtatgatcttgttttgcacacaaatctcatcgaattttggggttaaatggcttccgtggccgtcgagtactaaaagccgatatacccccttcatacgagaagaagtagctggaataaagagcttttgtagccaacgaaggcctatttcatctaacgtccacccatttggactaacttcaaagcgccagtcgccaggaaggccttcaaaccatgattcaaggaagaccttgcctttgaaaataatacacggagggagggcccaccccgctgcatttagacattcaattgtagttacccactcgcgatttccaggttataaaagtgatctccgaccgtagtattcacttcttgttataacccttaccgttgcagttaatcccattgcgaaaccagtctcgtcgaagttataaacatcgtcagggttgattccaaattaaaggatagttttttgaacgagattaaaccactctccaataatcttcggatcttcatacttcgcgcgctcgtaattatagcgtctcgagaatcgggaggaaaggagagggtgccgttttatgaattttgtaacccaattttggccaaccgaaagaactagggtagttccacgctttttgaggagaagatccgccatttctcgtaccatagagtgtcacgattggcacttgcggaagtcgtaccttcccgtttgtttgtacaagaagtcgtactttccttccagggtaagcgaggatagggctatgcccccaaagagtataaagaccccacagatgctttacgtttgttttcttttcttttccttcttcatacttgatatttcagttagaaatgcacttctttatttgaaagaacctggcaggtaacatagagggccgcggggctgctccacaagaatccatagagagaatccatttttcaagtgattcctcttcaatttgtgtcaatttacgtgaattggcgcgagaaatcgcgaggttttgtatcccactaaggcagcggcggagggtagtttcgggtacatcaaaacggcgcgctacttcacgaattgaagagatttcttgattcttaaaagcctggatagctagtaagatcctaccctcttgctctactgaatgtttagagcttcgggagcgaattggtggcatagtgggtggttgaagaaggagggtttaagttaattgacgcgttttggatggggtgcgccacttgggggtgaattacgttaccgataaaatcatctagaataactaaagtgttaggtgtggggttgaccaattgcataagatgcatagtttaagaaggctaaaataatatatcgtcgccacgcataggaggtggaaatcgtgggaccaggcttttgaatttgatcggccatcccaaattttactcctttatgcttcaaggggtcgaatccagtagggtattcctctccaatgggagaggtacgatcaaagctgatgatagagatggccaatatcgaaggctgcatattgtacgtagggatacagtctcaggctgaaagggatctcgctagccagtattgaaaatggcccatcaatgacaagatggttgggttgattgaggatttgttgggctacgtattgggtgttacgacactgttcttccggtatgttgagatttaccatacataacacgtcggcgttgggtgatactgaatgaccttgtacgacaatacaatgcggggaactcacggtattttacccctcatgtgatattacataagcttggcggctcagggtaggctcagggttggttcagggtaggctcagagttggctcagggtaggctcagggtggcttgggtagggtcaaattaaacaacgtctcggtgggccgactgatgactacgttgtaaattatgaggaatcttgacgttatcatcgtgtctccccagctcaaaaagcttgtagtaaaaaagaaaacaggagaaaaaaatccttcccttgcatttatgagattcctttattctatagaggattgactagtcgatatcctacggctgaccttccgaaggaacgtagagaaaaaaaagcgagtgatgtctcaggggatgaaagtatatatcaataggaagtcggatttttctctggtcagaataagcggcggcaacgggtttgccttaatttgtctaagttgtcacgattggcacttgcgggactcgtactttcccgtttgggattgtaccgttggtcgtttgcgcaggcagtcgcaccttccttctgggggaaacgagaatagggctttgtccctaaaggggtataaaagcctatttgttgttttcacgtttgtttcttttcttttccttttccatacttgatattcgattagaaatgcacttcttttgttaaaaggaatctggcacgcaatttagcaatgcacttcttctgctagaaagaacctggcacgtaacataagtaagattaagacgctctggtgattgcttcgaaaagagactcatacgatgtcgcatgtcaatagcagtgttgaagccggatgtatgtaaacggccctgtcggaacacctacgagcttctagagctgtttggagatatcatataatactgagggcggtgcaaaggaatctcttttcttcagcacatggctttcgatactgggccagaagtgacacggcaaaaacgacgaaggagatagcgggaaataaatgaatgtaaataataatatacagaatgtgacgatctgggaaggatcgtacttgccaaacgaggcaggaacgactatgccctcgcaccttcccaagtggacgaacgagaattaagcgagacaaacgcaagggtataagaagggaagaacgcgcactcagatagtttctctttttcctttcttcttcgtacttagaatttggtttgaattacactcctttcttctgaatcgaattggctcgtaacacagaatatgtttgccattgactcaagatacagaggtatagagcctcgagatgaataatgaattgcaagaacaaccatagttgactcgagtctatataaaagacttagcgcgagcgcgagaagacaagcgaaagatacactatgtaggtccgacatatcatctctcctccacttctcgtgtatgccctattgatatccctaacagctgacgaaactcccaggatacttcatttttgatacccaaggaactcacctgtcaagcacctgtcaagggttttgtcactgaccaaaccttgtgcccttttggccagctagcataagggacggcctgagcacttgtggtctgtcgtgactctacaagccattcttcaggtgccactataattattctgatgaatggatagtactctgagaaacataccgattacttacaggacgaacgatgcacttcctaggagcttatgatccacaatccggctaccaagaaatccggcagcatattttaattaagcataatttgtgagaccaactggtattataagtagtgtttctcatcttaggttttcactcgtacccgtttagcttctcgttgtctcaagcgtattgctacaacaatcacctctgtatactctattctttgcctcaaaataccatcccaccactcacaaaaactgcctcgcagcgatacggtttctgcctcttggaagaacatctgaatgattcattccagtgtcccagagtgatcgcctattcagttgttgtacctacgccgccgaatagctactacgcattttacttcacaagtccagagtaaggaatacgatatttgattcccccacaagacctcttcgtccctgtcggccatgccgcaactcaaaaatccgatgcaaccgtgaagtttctcattttcaagcttgtatcaagcgaggtaaaagctcgttgtgtgtctatgagatgagagtgctaaaccaaagttctgctcttctaggaccagccggcaaaagcaagtgcaggaggatgaacttggcgagcatcacattccatagaaggcttttgggtcgcaacccgaatagtatttgcagcacgaaaagaggtactacaagcgaagagctgcaacacactattgagccttcagatgaagcagatatcaagcacttggatcaaagtcattctaggaggggcgatttggcacctcacgaggcgttaccaaagagtattgcggctacaaatgcggaggaaactttgatttcctaactaaattatggccgtgcagctgttgaagttattcttaaatggccacagcatatcaggatctcaaacaacaaagctatatgtacagatgacccctccggtagccaatatcaacccgtgagaaagctaagaccacaaggctgactatcgataagactttgtcagaatctaggatgaatactgtcatttttcatccctgatacagttggatcacgtgactnnnnnnnnnnnnnnnnnnnnnnnnnnnnnnnnnnnnnnnnnnnnnnnnnnnnnnnnnnnnnnnnnnnnnnnnnnnnnnnnnnnnnnnnnnnnnnnnnnnnnnnnnnnnnnnnnnnnnnnnnnnnnnnnnnnnnnnnnnnnnnnnnnnnnnnnnnnnnnnnnnnnnnnnnnnnnnnnnnnnnnnnnnnnnnnnnnnnnnnnnnnnnnnnnnnnnnnnnnnnnnnnnnnnnnnnnnnnnnnnnnnnnnnnnnnnnnnnnnnnnnnnnnnnnnnnnnnnnnnnnnnnnnnnnnnnnnnnnnnnnnnnnnnnnnnnnnnnnnnnnnnnnnnnnnnnnnnnnnnnnnnnnnnnnnnnnnnnnnnnnnnnnnnnnnnnnnnnnnnnnnnnnnnnnnnnnnnnnnnnnnnnnnnnnnnnnnnnnnnnnnnnnnnnnnnnnnnnnnnnnnnnnnnnnnnnnnnnnnnnnnnnnnnnnnnnnnnnnnnnnnnnnnnnnnnnnnnnnnnnnnnnnnnnnnnnnnnnnnnnnnnnnnnnnnnnnnnnnnnnnnnnnnnnnnnnnnnnnnnnnnnnnnnnnnnnnnnnnnnnnnnnnnnnnnnnnnnnnnnnnnnnnnnnnnnnnnnnnnnnnnnnnnnnnnnnnnnnnnnnnnnnnnnnnnnnnnnnnnnnnnnnnnnnnnnnnnnnnnnnnnnnnnnnnnnnnnnnnnnnnnnnnnnnnnnnnnnnnnnnnnnnnnnnnnnnnnnnnnnnnnnnnnnnnnnnnnnnnnnnnnnnnnnnnnnnnnnnnnnnnnnnnnnnnnnnnnnnnnnnnnnnnnnnnnnnnnnnnnnnnnnnnnnnnnnnnnnnnnnnnnnnnnnnnnnnnnnnnnnnnnnnnnnnnnnnnnnnnnnnnnnnnnnnnnnnnnnnnnnnnnnnnnnnnnnnnnnnnnnnnnnnnnnnnnnnnnnnnnnnnnnnnnnnnnnnnnnnnnnnnnnnnnnnnnnnnnnnnnnnnnnnnnnnnnnnnnnnnnnnnnnnnnnnnnnnnnnnnnnnnnnnnnnnnnnnnnnnnnnnnnnnnnnnnnnnnnnnnnnnnnnnnnnnnnnnnnnnnnnnnnnnnnnnnnnnnnnnnnnnnnnnnnnnnnnnnnnnnnnnnnnnnnnnnnnnnnnnnnnnnnnnnnnnnnnnnnnnnnnnnnnnnnnnnnnnnnnnnnnnnnnnnnnnnnnnnnnnnnnnnnnnnnnnnnnnnnnnnnnnnnnnnnnnnnnnnnnnnnnnnnnnnnnnnnnnnnnnnnnnnnnnnnnnnnnnnnnnnnnnnnnnnnnnnnnnnnnnnnnnnnnnnnnnnnnnnnnnnnnnnnnnnnnnnnnnnnnnnnnnnnnnnnnnnnnnnnnnnnnnnnnnnnnnnnnnnnnnnnnnnnnnnnnnnnnnnnnnnnnnnnnnnnnnnnnnnnnnnnnnnnnnnnnnnnnnnnnnnnnnnnnnnnnnnnnnnnnnnnnnnnnnnnnnnnnnnnnnnnnnnnnnnnnnnnnnnnnnnnnnnnnnnnnnnnnnnnnnnnnnnnnnnnnnnnnnnnnnnnnnnnnnnnnnnnnnnnnnnnnnnnnnnnnnnnnnnnnnnnnnnnnnnnnnnnnnnnnnnnnnnnnnnnnnnnnnnnnnnnnnnnnnnnnnnnnnnnnnnnnnnnnnnnnnnnnnnnnnnnnnnnnnnnnnnnnnnnnnnnnnnnnnnnnnnnnnnnnnnnnnnnnnnnnnnnnnnnnnnnnnnnnnnnnnnnnnnnnnnnnnnnnnnnnnnnnnnnnnnnnnnnnnnnnnnnnnnnnnnnnnnnnnnnnnnnnnnnnnnnnnnnnnnnnnnnnnnnnnnnnnnnnnnnnnnnnnnnnnnnnnnnnnnnnnnnnnnnnnnnnnnnnnnnnnnnnnnnnnnnnnnnnnnnnnnnnnnnnnnnnnnnnnnnnnnnnnnnnnnnnnnnnnnnnnnnnnnnnnnnnnnnnnnnnnnnnnnnnnnnnnnnnnnnnnnnnnnnnnnnnnnnnnnnnnnnnnnnnnnnnnnnnnnnnnnnnnnnnnnnnnnnnnnnnnnnnnnnnnnnnnnnnnnnnnnnnnnnnnnnnnnnnnnnnnnnnnnnnnnnnnnnnnnnnnnnnnnnnnnnnnnnnnnnnnnnnnnnnnnnnnnnnnnnnnnnnnnnnnnnnnnnnnnnnnnnnnnnnnnnnnnnnnnnnnnnnnnnnnnnnnnnnnnnnnnnnnnnnnnnnnnnnnnnnnnnnnnnnnnnnnnnnnnnnnnnnnnnnnnnnnnnnnnnnnnnnnnnnnnnnnnnnnnnnnnnnnnnnnnnnnnnnnnnnnnnnnnnnnnnnnnnnnnnnnnnnnnnnnnnnnnnnnnnnnnnnnnnnnnnnnnnnnnnnnnnnnnnnnnnnnnnnnnnnnnnnnnnnnnnnnnnnnnnnnnnnnnnnnnnnnnnnnnnnnnnnnnnnnnnnnnnnnnnnnnnnnnnnnnnnnnnnnnnnnnnnnnnnnnnnnnnnnnnnnnnnnnnnnnnnnnnnnnnnnnnnnnnnnnnnnnnnnnnnnnnnnnnnnnnnnnnnnnnnnnnnnnnnnnnnnnnnnnnnnnnnnnnnnnnnnnnnnnnnnnnnnnnnnnnnnnnnnnnnnnnnnnnnnnnnnnnnnnnnnnnnnnnnnnnnnnnnnnnnnnnnnnnnnnnnnnnnnnnnnnnnnnnnnnnnnnnnnnnnnnnnnnnnnnnnnnnnnnnnnnnnnnnnnnnnnnnnnnnnnnnnnnnnnnnnnnnnnnnnnnnnnnnnnnnnnnnnnnnnnnnnnnnnnnnnnnnnnnnnnnnnnnnnnnnnnnnnnnnnnnnnnnnnnnnnnnnnnnnnnnnnnnnnnnnnnnnnnnnnnnnnnnnnnnnnnnnnnnnnnnnnnnnnnnnnnnnnnnnnnnnnnnnnnnnnnnnnnnnnnnnnnnnnnnnnnnnnnnnnnnnnnnnnnnnnnnnnnnnnnnnnnnnnnnnnnnnnnnnnnnnnnnnnnnnnnnnnnnnnnnnnnnnnnnnnnnnnnnnnnnnnnnnnnnnnnnnnnnnnnnnnnnnnnnnnnnnnnnnnnnnnnnnnnnnnnnnnnnnnnnnnnnnnnnnnnnnnnnnnnnnnnnnnnnnnnnnnnnnnnnnnnnnnnnnnnnnnnnnnnnnnnnnnnnnnnnnnnnnnnnnnnnnnnnnnnnnnnnnnnnnnnnnnnnnnnnnnnnnnnnnnnnnnnnnnnnnnnnnnnnnnnnnnnnnnnnnnnnnnnnnnnnnnnnnnnnnnnnnnnnnnnnnnnnnnnnnnnnnnnnnnnnnnnnnnnnnnnnnnnnnnnnnnnnnnnnnnnnnnnnnnnnnnnnnnnnnnnnnnnnnnnnnnnnnnnnnnnnnnnnnnnnnnnnnnnnnnnnnnnnnnnnnnnnnnnnnnnnnnnnnnnnnnnnnnnnnnnnnnnnnnnnnnnnnnnnnnnnnnnnnnnnnnnnnnnnnnnnnnnnnnnnnnnnnnnnnnnnnnnnnnnnnnnnnnnnnnnnnnnnnnnnnnnnnnnnnnnnnnnnnnnnnnnnnnnnnnnnnnnnnnnnnnnnnnnnnnnnnnnnnnnnnnnnnnnnnnnnnnnnnnnnnnnnnnnnnnnnnnnnnnnnnnnnnnnnnnnnnnnnnnnnnnnnnnnnnnnnnnnnnnnnnnnnnnnnnnnnnnnnnnnnnnnnnnnnnnnnnnnnnnnnnnnnnnnnnnnnnnnnnnnnnnnnnnnnnnnnnnnnnnnnnnnnnnnnnnnnnnnnnnnnnnnnnnnnnnnnnnnnnnnnnnnnnnnnnnnnnnnnnnnnnnnnnnnnnnnnnnnnnnnnnnnnnnnnnnnnnnnnnnnnnnnnnnnnnnnnnnnnnnnnnnnnnnnnnnnnnnnnnnnnnnnnnnnnnnnnnnnnnnnnnnnnnnnnnnnnnnnnnnnnnnnnnnnnnnnnnnnnnnnnnnnnnnnnnnnnnnnnnnnnnnnnnnnnnnnnnnnnnnnnnnnnnnnnnnnnnnnnnnnnnnnnnnnnnnnnnnnnnnnnnnnnnnnnnnnnnnnnnnnnnnnnnnnnnnnnnnnnnnnnnnnnnnnnnnnnnnnnnnnnnnnnnnnnnnnnnnnnnnnnnnnnnnnnnnnnnnnnnnnnnnnnnnnnnnnnnnnnnnnnnnnnnnnnnnnnnnnnnnnnnnnnnnnnnnnnnnnnnnnnnnnnnnnnnnnnnnnnnnnnnnnnnnnnnnnnnnnnnnnnnnnnnnnnnnnnnnnnnnnnnnnnnnnnnnnnnnnnnnnnnnnnnnnnnnnnnnnnnnnnnnnnnnnnnnnnnnnnnnnnnnnnnnnnnnnnnnnnnnnnnnnnnnnnnnnnnnnnnnnnnnnnnnnnnnnnnnnnnnnnnnnnnnnnnnnnnnnnnnnnnnnnnnnnnnnnnnnnnnnnnnnnnnnnnnnnnnnnnnnnnnnnnnnnnnnnnnnnnnnnnnnnnnnnnnnnnnnnnnnnnnnnnnnnnnnnnnnnnnnnnnnnnnnnnnnnnnnnnnnnnnnnnnnnnnnnnnnnnnnnnnnnnnnnnnnnnnnnnnnnnnnnnnnnnnnnnnnnnnnnnnnnnnnnnnnnnnnnnnnnnnnnnnnnnnnnnnnnnnnnnnnnnnnnnnnnnnnnnnnnnnnnnnnnnnnnnnnnnnnnnnnnnnnnnnnnnnnnnnnnnnnnnnnnnnnnnnnnnnnnnnnnnnnnnnnnnnnnnnnnnnnnnnnnnnnnnnnnnnnnnnnnnnnnnnnnnnnnnnnnnnnnnnnnnnnnnnnnnnnnnnnnnnnnnnnnnnnnnnnnnnnnnnnnnnnnnnnnnnnnnnnnnnnnnnnnnnnnnnnnnnnnnnnnnnnnnnnnnnnnnnnnnnnnnnnnnnnnnnnnnnnnnnnnnnnnnnnnnnnnnnnnnnnnnnnnnnnnnnnnnnnnnnnnnnnnnnnnnnnnnnnnnnnnnnnnnnnnnnnnnnnnnnnnnnnnnnnnnnnnnnnnnnnnnnnnnnnnnnnnnnnnnnnnnnnnnnnnnnnnnnnnnnnnnnnnnnnnnnnnnnnnnnnnnnnnnnnnnnnnnnnnnnnnnnnnnnnnnnnnnnnnnnnnnnnnnnnnnnnnnnnnnnnnnnnnnnnnnnnnnnnnnnnnnnnnnnnnnnnnnnnnnnnnnnnnnnnnnnnnnnnnnnnnnnnnnnnnnnnnnnnnnnnnnnnnnnnnnnnnnnnnnnnnnnnnnnnnnnnnnnnnnnnnnnnnnnnnnnnnnnnnnnnnnnnnnnnnnnnnnnnnnnnnnnnnnnnnnnnnnnnnnnnnnnnnnnnnnnnnnnnnnnnnnnnnnnnnnnnnnnnnnnnnnnnnnnnnnnnnnnnnnnnnnnnnnnnnnnnnnnnnnnnnnnnnnnnnnnnnnnnnnnnnnnnnnnnnnnnnnnnnnnnnnnnnnnnnnnnnnnnnnnnnnnnnnnnnnnnnnnnnnnnnnnnnnnnnnnnnnnnnnnnnnnnnnnnnnnnnnnnnnnnnnnnnnnnnnnnnnnnnnnnnnnnnnnnnnnnnnnnnnnnnnnnnnnnnnnnnnnnnnnnnnnnnnnnnnnnnnnnnnnnnnnnnnnnnnnnnnnnnnnnnnnnnnnnnnnnnnnnnnnnnnnnnnnnnnnnnnnnnnnnnnnnnnnnnnnnnnnnnnnnnnnnnnnnnnnnnnnnnnnnnnnnnnnnnnnnnnnnnnnnnnnnnnnnnnnnnnnnnnnnnnnnnnnnnnnnnnnnnnnnnnnnnnnnnnnnnnnnnnnnnnnnnnnnnnnnnnnnnnnnnnnnnnnnnnnnnnnnnnnnnnnnnnnnnnnnnnnnnnnnnnnnnnnnnnnnnnnnnnnnnnnnnnnnnnnnnnnnnnnnnnnnnnnnnnnnnnnnnnnnnnnnnnnnnnnnnnnnnnnnnnnnnnnnnnnnnnnnnnnnnnnnnnnnnnnnnnnnnnnnnnnnnnnnnnnnnnnnnnnnnnnnnnnnnnnnnnnnnnnnnnnnnnnnnnnnnnnnnnnnnnnnnnnnnnnnnnnnnnnnnnnnnnnnnnnnnnnnnnnnnnnnnnnnnnnnnnnnnnnnnnnnnnnnnnnnnnnnnnnnnnnnnnnnnnnnnnnnnnnnnnnnnnnnnnnnnnnnnnnnnnnnnnnnnnnnnnnnnnnnnnnnnnnnnnnnnnnnnnnnnnnnnnnnnnnnnnnnnnnnnnnnnnnnnnnnnnnnnnnnnnnnnnnnnnnnnnnnnnnnnnnnnnnnnnnnnnnnnnnnnnnnnnnnnnnnnnnnnnnnnnnnnnnnnnnnnnnnnnnnnnnnnnnnnnnnnnnnnnnnnnnnnnnnnnnnnnnnnnnnnnnnnnnnnnnnnnnnnnnnnnnnnnnnnnnnnnnnnnnnnnnnnnnttgttttgtttgttttgattactaagttgtccatcagattgtcatgttttaggactattgtcagttttagagagttagagaatttattaagatttttctgccacaaaatacactcgccttaccaccgtttttccgtcagacttctttgcctccacggccgaatttcaatattactagggagatataactacggcccacatacgatccaccaactgttgttggtattgaacttccttttcgtctccttgatgctttctctaaatgtaggggctctgtggaaggtaatatatcgccgcgactgtgattgggaagagagctttgtcttacagcacagtcagcttcaagggtgagtggtcgggcggtggaggagaatacctcacggcgggaatcttagtccatcgaattatgtaagtttcttaaacagggggttcaacttttggaaatctatctggttaattacggcgtcatcactgtcatctgcctgcaataaccactagtgtggtaggtaattgattagaatgaaggtatagtgtagtggatatgtcattttcgtaataaatttatccattcgacaggtagacagtatatcgtaagagaattcgtaagttcaataagttttgtaattatatatatacattcgatatgtgagtatcaactgcttttatatattttgaatcacagtttcaacttcatggttgattgtcgtttattaatttccacttaaaatgaacacattcattatacataattttagtcaaataatttgaatatatgtcattatttgacatttacgtggttaaaaaataaaaacgtagtatgaaaagtccaagcgaccgaagtgcgtctttgtaagcgggcccgcccgcgcgtgcgcggaggttttgccatctcacccacacatatcaatttacaccgacccaattgcgtcagtcatttctagttcgcttgagaaccttaccaggcttcacagtttcaaagagcggcaatggtctctctgcagagttgctaatcttctctagcaccgaaacacagttttaatctcacttttgctattggcgacgctgtcttcgactgtaatgtgggtcttgtaaacggcggacctgtgaattactgtatgcggttagttttgcctttcttggtttagcgcctcaatacgctgtcacgtaacccgtaacctacgttgagtgccctctgactaaaatatgtattcgtctcccctacctttctctcacctttccatttttctgcctctctatcttgcactcatcgcctccgcctttcttttactctggcccccaccgactactgcacattt

SEQ ID NO: 111 - DNA, 249253 bp, Penicillium roqueforti
  misc_feature (178620)..(178843): n is a, c, g, or t
  misc_feature (245417)..(246606): n is a, c, g, or t
attttatatgtacttaggctctatgatttcctatatagactctagtccgccagcggctgtaatatcgtccaacgcgagcttccgtagctcggcggaaagggaattcccaactttgcgctgttgtagaatattgagtaatcggccgcgatattgtcctcttcgccaaggtatggataagaggtagagagatcttgccttcatttagatcctctgcgaagccttttttctttgtatactgtcaatttgggtaagcgcagtcaaaaaaaacagaatcaagagttaaaaaaccctgtcatagaaagaaaaggttttcatcatacatccgcatctaggaggtttagatagtcatcacggacttggaagaacctgcctacggccttcatgaagggtgagacatcgaggtctttgttcactgttgcctcggagcgcatcaattcggccacaagaacaaaaaaaccgccggtttctgagatagaataatgatcagcatttaagtgagcgttggggagggtaattgatcgaacatactaccatcaatcatagtaaaatattcctcctctgtcggaaccaccgtctgatttgtccagtgtagatccattccctggccaatgtggccttctatcagtctggttgtgaagatagcagcagcattgggtgacagtttcatcgcagcccttgaggctctcagcagtagaaggtttgcagaattgattgtctggccaatgccaaaaaccaaatgcgtagctgggaacccacgtcttaatggtgagttatcctgtatgtcatcaaccctagttcatatttgtcaatggcccgggatattgacacagcgaagaatcagagaaaatcatacattagggaggaactgtgtagcaaatcggcaatctcttgaatgattataacagatcgttccgggacttgataccagacgtcaagaccatcaattgctgcattcctcaccccctttgacggtagagacttgaggtagacatagggttccaatgcaatctagattctgcttagtacatctccagtatctggaggctgtgggcttacttcttcaaattccgagatatggaggggggtatcgtctctttgattctcgaattctgataacgcagggctgatgggtgcattgctagcttcaccattcgtgctagatcctaggatgttcggggaatcaagggtttcgaatcccacaaaattatccctttttgcaattatcgtaagcgatgtgattggtttgcttaggctgctgaaaggatgagaggctttctttttctgactcacaacccgcaaacccggatacgcatcttcaacgtcatcgtggtatcgtgcagtggtcatgctccacgcaaagttcccagcagtcacaatgtccagtaactcaaaccatttgattatgctttttgtcacgtttccacgagcgaagtaatcggccttgagctggcagtacctttcctcgcgagcaataatctcactccggagcatcttcttagccgtggtcggatcgatgttatgccacttcatgaaaagaaagactgcgctaacaatctggccggtgcttccgttggattcgtagttcttgtgctctttttcccaggaaaagtagtcattcaccagaacccaagcatcatatgcggcacttgtaatgctggaagtttgtgcggtctcttcagccgtgaggtaaaaatccatggaaaaacacatcaaggccatggtccacctattcagcgcagttagctgagaatcctcactagggctcgctcgaaacatgatatcttacgggcatcctgcatcaacagcgcggaatatgaaataatcttccaatgtttgaaagtcaagatctctgatatccacaaacacgtctgacatctccttccagagacggagaataacctggccctgttctaagtcgaattctagaagctccgtagccattttagcttgcatttgtctcttcaaattgcttctcgtagatagttttccatccccatactcctcgaggccttctgtgagttgcttgtttgctttgtagagctgcaaaatgtgtcttgtcagaagaggcaaagataataaatgtatcaaaagtaaatactcacttctgactcgcgtttctcttcggcatattcaatgactgtaatgtttagttggtttattgggccaatttgagcatgacgggggccacttacggtcatcatgcacgtacgtatacttaataatgtatgaaatcaaagcaagccgcttaggaattgcttcaactgcatatagagctgtaaagttaccaacggtcgggttgatacaaccaacagcgtagcttttgttgcttccactccgaaccgctgcagcataagcagccccttaagaacccagaagatccatctgacattgccaacaccctgaatcggcgagatgagtatcacggtggatacaaggagtgaacttgcaaaagtactcttctctcttatatgcttctcggggaactggaagggaatcaggtacaaagtgtctcgtaggatcctgcctccgcggcaatatgattgtcttactcttaaaggatagagaaatcggacgtgatgttttcagtcgggatgatgggaatgacttggaagacatttcatgaggaagtatcatctattaaatatccagttgtgtgggatagaaactgaaaaatctaataataaaaatgaggagatataatgcttatatgtcattagctcgaactattttccaaaactctgtgtctatatgaatgtgatctatatgaatgggatgttcctatgattttaaatcagatatttatgaccatatatagtagtactactgtatataattccaattattgtgctgtacgcatataatcaaagtttagtagaattatcgtgaggctaatatatacgaaaaaccatgtgatcaaatatataatgtggcccacatttccattttaggataaaacctactaatctagtatacagcttgagtctgatcatctggggctatcgattcaaatgagcatgaagtttcaatccctaaaaagaagttaggatgtttctttctattctaatagtaaaatctttgattgacagtcgatatcgatattcgatatcgatatttttccttaaaaaaagcaattctttatggtttgatgttgtttacaactgtacatgtcacctatgaatttgatagtggctgcctacgatagtctaccctataaagatttacccacttccattttgtttttcttggtgtataaatagcgtggtatataattcaacatacattacacaagtacctgagtacgtcggtatgttaataccgagaggttgtataatatagattgcatccacaggaaatgctatcatgtaatggcgattgttccgccaagaaataaactttttagcgattttttaacaagggaggatatttaaatgtgggggacagtttaacctaatgaactctttgataacctaatcgatcggtatttatttcttgaaggaatggcacttctagataacatgggggtttcttgctacctgacattgattatgtctgccagtctggtaagttgaggctggttctctttaaagattaccttatgtatgcctgttgactgacctcgggatgtatttggtaagttgtggttatcctctaaagctgtttataatatatggtttcatccattgaggaatttccccggtccatggtacaccaaagtatctaggatttggtacgtcttgcgggtcctccagggatgccacaaatatgagattaaaagactccacgatgaatatggcctggtcgtgaggattgtaccagatgaactctcatatattgatcctagggcttggaatggaatttatggtgaaaaaccctcttccttatctttctaaggtcatgaaaatgcactaataaactacaatttgaaggtagcgttgtctataaccatggattatatccgatggagaaagatggggatttttttgcaacagcctttggagactcggaaactcttgttaggatatgctaccctgatttatttatcctaatatttctctgactaatggaaactaggtgggcgctaagagtgcggagtataaagtttaaaagaacaatgctgtccggggcttttcatatgggcaactgcttcagaaagaggatatgatattatctcacgtggaatcttttacccacaacctcaaaatttatctcgaaacgaaaaacgaggatatcatcgatatcgatgcctagattgggaacttgatactcgatatctatgtgaagcttaccataggccacgatttctatactatcgataaggggccttcatcccacaccttggtgagcactatatataagatagcgaaggccttgcagtatattacccaacttctttaccttcctctatccctatcgccccttttccgcttatggatatttcgtcgtgatatctttactatattcagcagacttcctcctttaggaacagcaattactgagcgcctggagcggatgggtaccactgataaccgtgtggacttgggtaagaaagctgtcctgattcctggctctaacttctgatgtaatactcaccgtttcaaagtatactatatagagaatgattaagaggacggcataattgattccgatacgataaaaaggaacgccttgattgtgattcttagcggaattgagacactccctgattatattggttctgttatttactatatgctccaaagtcccgagcattttgctcggcttaggaaagagatacatactgtatttacagtctccgaggacattttagcggaagcagttcaaaatcttaaatttttgaaagcgtgtatgaataagagccttcgcatggctctgccatttataggcaccctacctcgtcgagttcctgcttgtggtgtgtatatttgcggccagtttgtaaagggtggtactactgttggcattcacaattggtctataatgtatagtgggaggttttggaaaagtcctgaggttttctgcccagatagatggatggacgaccctaaatatgaggacgatacgcgtgaggccttctatccgtttggagttgggcctcgaatatgtgttgccaggaagtgggtctactacagcccccgaaaacatatatgagattgctgatcagataccaaatccagtctcgttattattaaagccagtcttatcctcgctcggatcctgttcgactttgatatggagttagagctttccagcagccatgattggccgaagagaaatggtcacctggttccgaacaagcgtccgctatttataagagtcaaagcggacacgggtgaaggaatctagtagatgtttgacccttcctgctaccaaatagctcagagttgcctcggaattttctactatgaagtaaatagaaggatgcttatttagtcgaaaatcggtgaggtgcctctgtttaaatgtacaatccgcaaccaagatatttgttctccacgtctttttcttcagggtcccatagcgaacgtggcgatgttgcaccgcttagcttataaaaggtaatgacgaggtggccttgatgatacgattccaagtatgcagcatataaagattgataaatggtgtatccattgccaatctcttcttattgattcctatagagttctattatgagggcatatcaaactcgctatagaaaaccattggaaaaaaaccattagcagagaaatatcaggcttagatggagtctgaggacactgtgctttatgcagaacacgtccgattcagttaccccctgggcccctgagacctctatggtatggtggaatacgaatattgaatccaacactatgcctgatgtacattctgggtaagcgttttaggctgatcgctgcttatctcaatgaagaacatagaaatatgagacatcagcaagaaaagacctatgcatacctattgcatacctgcgcaagcaacttatcattttcgtgaaacaagcggtgtggatcctcagccagccactcctgaggtctggggtgatccccatggatctaccgaaataaagtgggcgggtggagtaaatagaaatttcggttggcgggcgaaaccgtaaggtgtagctacgaatgcaagatagagtggatgagataatatgaagaggtgtgggaatgaaaggctattgtacagggtttcctgggtgggatatcacatccaaagcccgacccgcatgttaccaccaatgaagcaaagtatataacgcatagtaattcgaatgcgtaactagttagtgaagagggatatacatcattattctcacttctggttaatcacacccttcttgcgtagtctgcgcctccatcatatctgttaaattacatcatacttttcgtactgcaaatttctgtcaatgatcaatattctcatggtcactacgattagagtgggtgacattcggtcggttccccgtaccatatcaaaaatgttcaattatctatcgtaataactagcgcagtaggacagctgaaattaaaatgggggatatttacctatcagaattcagcttaatcggaattgatttaggctctgcagtctagtcaacaaattactgtcagaagtaatggattttgataggcggggggacgggagcacgcagaatggagaatgaggaagcgaagaaaggcagtgaggccgagtgtataaagagaaatcttaagaagagaatggacaatatcgagaaattttagttcgtcctaaatatactcaataatcgatatattgctcggggacccctaaaccccaaaccaatgaggaaatttgttttctctggtgtctacctttcatcgcgcttttttcgagaagcaatgagatagtgtcttgaagagctttaaggagagtttcagaaaacgtcaaattggaaatatactgaataaggtctatcggcagataaagagtaacaatcttccgtcctgcaatgaggttttgttgggtggccggaaggcggtcacccatgtaggtacagatcaccagatagttccgctctctcttcctctctctcttcccctcctgtccatgagaacttagcagaatcaataccagttgtttcctctttacagacacaaagtagtacgatctccattaggttttcctatccttcattgaccgcaaggggctgctaatatacccttggatgctgaaagtttttgagccacgagccaaattttccttaaagtctaaactccctagtgggcttgcaggccgctgctgtcatattccttcggctactacggaacaaattggttctgtcagcaataggctagggtacagtgacgaggagcttgatttcctctgggaagaaagcggcactagtggcaaagattgggatattatctttgacaaatttaaaaagagagtcccctaccagaaatgttcttctcgcgaagaatagaccgggattttgtagtggagcgatatgttcaaaatcaaagcagtgtcaggacctttgggcaatatcattcatgatcccggaaacattaataggttgagtggaaattttttcatggaagcggtacggaaattcgccctcgatacgatcctctgggtttagcgattcggctccgttggcggcgtcatcgacgtttgtaaacctcaagttcgatggaaccgaatcttgtgaaacagagacagggtatctagcgggatgatcggttcttcggaacttctctctccctgattccatccccgaaactaggccatgatagagaatcacttaataaaagttcgcacggagtaggttaagtcgttaaatgaagtcagctcacagttgtaggaattttgcaattgattgaaccatagatctaggtcttgtactagatcgagcagatgtatcttactctgtaaaatcgtgatatgtatactgtctgacattggtatgttcgcaaaacgttgtatttcattatagcggaatacgaaggtgtatagttagttaacggccaacagtcggatgcctgattttaatggttttacagcgtaattaggactagctcctaccagctttaggctgacagaaaattaaaatacctgaattaccatgacagatctgctggcttgaaacttaaaatatgaagctattcatacccaccacagtcctgtactttcccggagaaaagctgacagcgctactgaaaccaaggcccaaaacgtctggaaagccaaccctagattttaatataaagtccctattactaccggccgtacaaacttcaaactctctgtatcctctggctccagcgtgccgaagtgcccttggaggggttgcgctttcaacgactgtaataggaggcggtgatccgaatgtaggagacgcgttgaggtaacttcaatgtgaacttacaaaatatggtattgagcggtgtgaaaggcggtctaaaactggtaactaagagctaactagtcttaattaggtcataaaaccattaaaatcaggcatccggctgttggccgctatacacctgcgtagcggaatcttcgaaattgatctatatgcaacccaacaatggcggaacttgcgctgtaactatatgcttggcagataattttcttttaggcgttcgcaaatgatcttttaaaaaactatatgcttgagaccagcatataaggctttcgagaagaaactattaatcccataattgaaaatgtcgaatttcgtacagcgtaatttaccactagaccataacaaaaaccaaggttcctgtttagggcctagaggggccatatcccattcttgacagaaaacattgatgtcggaaggaattgcagacaagatgtgctgataaatttcctcgggttcgtcggataaacttcatgatccagctgttggtttgtgaattctagagcaatcgacctgagtgcaagaagtctcaagagcttgtcctcgggactgagtattcgatctccttctacgcaccttatgtgctcaaatcgaaggtcatcacagtttcgcttgcgagatagtagctggcttaggaacttctggccagcttcctatacccagcttgctgataactttattcgtttcaacaagtcagggatatgatctggaggtggtttggattccgcggatatatcgctacgccgctaccggaggcgcctttagtcggtatcaaccgggcggttagagcggaaccatacaggctagcgaaataatgtgtttgtagagataggatgccttggttgccaagtgctgtcgtttcagcaatttggaaaggttgagttgaatgtagagatagcacgcttggtaagtccgtaagactcgcttgaaagatatcgacggtatgaggtagtgctgaagacgttagtctaagcgaagcttaccaagctgcgtcaagtactcagtggtctgttttgcgacgcgttctttatcgtccgatatcatctttagccaaatttcactgaatggttaacctcgaattcgtctagtaagaagaaaacttgccccattgtcttcttgccattcttcaatgatttggagtataggcattaaggtccttaacgccagaaacgtgatattggggacttcgaaatttggtagctcggtagaccgtcctttcaggatcaaattagagtctaaagaccatacccctcgattgctgaccccgtagaggaggttcacgtcactctggtaacgacacgcgtcttgacgtgtttgggactagctacacgccgaagaggtattttcggtggtcatttggtaaagaatcgattttttttttaaagggatgtcggattttggagtcaggagcatcaaaggctcttataatgagggccggggcgatcggcgcgacaaagtcatggtaaaacatgtatcatataggataatcattgaaccgtagaatgtcctcgccgatcgagtcgacacaaaaggccaacgagttgttgcctgggggtactggggcaccggtcgcatcgggccagctgcattgtcccgtgacagttcgttttccgtcgcaggcggtggaagatcccttggatgttaggatcaattttgtgtcgctcgttttattgctgatactactcccgacaagcgatggaggaaacaatcgtcgagctgtggcgtcagcttgaggaagagagacaagcacgagaataagaacggagggcgcgagcgagaagagccagagcagcccaacacactatttcgccttctcgatcgccgccaccactctttatctcaagcggttcgagttgagacggatgcgaccctcacggcccagggcgatgcgtctgcccctattaaccgactctatcccaaacgcattgttccttggcttgacttcccccgactccaagagcaactttgcgtcacatgccaactacagaaatccatttctttgaactgaaattccaggcaggggatcagcatttgaccctcgccgttaataatacaacttagcagagcgagcacttccagggcacgattccagcaatattttcagagagcgtgtcttgggcctatctacgttctagacccatgagataatttatcgctatctgtgccccgcgtacgcaatagcccatactaacagacatctcatcaggaatgtcgacgaactgtccgatcatggccatattcttcattccgtctggaatgactgcaggcctgtcgtaatagtcccgccgcaacagaggcgccgacttacgaggcatcacacaggggatggtgatcgaatcctggagtatctcgctcgggaattggaggtggtgcaaaatctcagtcataatttccttgccggagcacttgagcattggcttcctgacatggtccccttctttctctgggaatgccgcgtagccccagaacacctgcacgtcgaccggctggtcagaaaacatgggctgttgcggcaggtagaggtttagcaaccagttgctgttttgaagggtgacaaatgtcccagtgcccggctcgtcacctgtcagctggatgaaactctcaaagaatcgcgtatttttgagcgtcacagtgaatgactcttgtcgggattcacacatacgagtgcaaaagttatatgcgttgccaaatttcgaatcttttgtcgacagctctagccacaagagccagttctcgtccaggtcctgatcgatctctatcaactcaagtgatggtggggagttgttcgtcccggtagttgcgccagacatcactgagcctgccgatacaacgacaatatcctgctgcccgacttcaatccttctctccggttcattgtccttgacagcgcagatggtggacacctgttggtgtgatggatcgataccgatatccgtcacagtcgtgcgaaaacgaaagtcaacgccacgagacaccaggaaatgagctataggttcgataatagcctcgtgggggttgtagcgaccgacgtcgagctggcgcggatgatctaatttgtgggtatctttcatgaacccctgtacatatcgacggaattccacgaggctgtgccatggctggaaaccgaacctattatcagagacatcgtcagtttagtgattggtagattcttccatctatcaacgatacatacgttgtcgctaataacagccagtacttgctctcgaaaaagcctttgtggaaataatcactaatacgagatcgcgatagactcttctccgatttgaaacccagcgtgaccagatccatgtggtctcttagtcccagcccaatgtttttaccgttttgccgttccatgcaggagggttttcggacgagaaatcttgtattagggggttttccaggtggttgtgagtggttgaattcaatcatttcgtctaggacggtcttatttgggtccgtcttcgaaggtaccagcgaaaaaagccgctccatgcaactatcattgagggatggcatggaaccagcctggtagtgataaccattgactgaatcgccagaggtgacagagtcccctccagcaaactccaatcgttcgaggatatggatccgtgagggtggaacactagcctcttgaatgagatgtactgcggctgttagagaggcgatcccactgccaaggatccaggcgtccagattgtttggatcccgtttctctgatagttggttcatggcgatgttaggaatggttgcattgaatttgcatgaatgacagaacaaacatgttgcgccaggaaccaatggtttaaaagcccttgatggtccaagatgtgttgttgtagatgatgtcatttagacttgcggagtccttcctcttcgcgctgggatgtgcgttagctgaagcggccgctcagtacccatggtccacggatcgatccaacgttttgaggtggccaggcctcaatgggtgaccttatttcaattgctatcacgaatgtaagttagtcgtgtgcaagtcaatttattgacgtcatactctcaccaccgtcgtttccgtgtcttcagcgtgcgatctcggaacatgctaatatttttcgtaacaatcaaaggtcaatattttttacaattaactaaatcaattgttaatctgattgttcttcgggttgtttggtctaatcagaaagactaatcccttgggtccgaagcccaactgtctctgcacgagggtgagaaatttgaaaatggatcagaataaagagtttttcctaatattgtacatggaccttcaaacaacaagggctcaggagctcgtgggtaggaccaaaggagggaaagagttttattagggataggagagctcccgactgtctacctacctatgtatgaggtcacaccacaacattggcaagatttgtttcaagttcctttgccttctgactcaagtaggcaccatcggccttgacgtgaccagcctggccaaccataccagcaaatataataattgtggccttcaggtctgcaagatgtgtctgtatcaacattcttgcaacccttgttccaaaatcccctgatatttggtactggcctaagcgaacctctgccgaaatgcatccttttccaaacgcgcagatagaaacacgagtccattccaacaaacgtgccaggaccatattgaccaggagaagcgcttgtggatctcgcatgcaatggtgacaattgaagagagagcgcatggatggaataatccgctgcgactgcgtcaggagcatatcgatggcccgtgcctgttctgacgtttgaggaatggcttggagtgtgcaaaggtgattacttagtgttacaaagcaaccgccggatcgggagtgatgacatggattccccagtagacatgatccagaatgatcggaaagaaatgcatggttgggcctatcattgatagtgttgcatcttaatgattttggggagtatgggaaatggaagggaaatcccatttcagttgcttgtgcgttgtggaacactgcctcttcgtagccaaggttgctgcagttcaagatttttcccgatctggttgatatttctttctcacgcggtgttcctattttctgtcaatgccgtgtatttggcgggatgcttgcccatcagaggggggtaataccagtcaaaccaccgggtagttggaaacaatgctatcgacacccagtaatattagtctcctggggaaaatgaaatgcaaggacagatcagtgtacattatcaatggattcacctgggatagtgggtagccaatcctccatgcagccaaggccactttcaggcgaaatcaattcttgaaagggaagagattctggattgaaagtggatgaaccttggctgtcaagtgtaattcctacattggatggcgatggtagtggactaaataccgagtcttcgtcacaggaaggtagtggtgggatcgccggggtgctgtcgctggttggtggcggtgtatggatcgttaggtcatgcttctccattgactctttcccctgccgtagacgctcgattgtctttttattcatactgcctcttggctttcctatctttgctttcaaactatagtgacactccaggttgctgttgagagcggggggtggagaattagcaacatatcggatattccaagaagaaagacttactctccagaacaccgtgcgcagggcaaattccccgtgcagcgtactttggctgcatggcatccatcacaagcactgcgaagccttgaagggttcttttctaattgcttggatttccgtatcttgtcatttggcttgattggggaagttgtaccttcacagccaaccagaacagaagtttgagacatcagatttaacgcagagcaaacaatcgagggaaccagtagcctttacctattgcgaaatttgatgtaataagacgcgatggtggctgctggaggcttataagtctgacgttttcttcacaaaactatcggcaactctacaacggtactcccgccttctggcgtccacgaattgcctaattgggcttagaaatgcctccccaaactgttttcgacccattcaatctcatttgacttgtttcataaccgaaaaaatgggggcccaaagctaatcgatatctatctatggatgctcgggcagggcactagggagatggaaccaacccaattcttatatttacgagtcattcttattgacttttgtgcattcttcaaaccactagttatgtgggagtcggataattcgcttttacggtgagagtgtaccaacccgggcactggcttggctgatgttcaagtaaataagccaatgcccacaaatggatacataatgcaggtatagtgtgtgaatttgaatgaggagtagaagagtggaccagctcccaaggtactagccactgggctttatgggctttatctgccatggcccgtctccaaggtcccaacatcccgcagccaccggactttagtcgactttgactgtctccaaggtcctaacagttcgcagttactggacttcattcgatttaggccgtccccaaggtcctaatagcccgcagccaccatgaagtatagcaacgtcaaatgaaacacaccaaatgaagtccacgtgcgcgagtcaaaaacgggtcaaaacgtggaggctaccccgtccagtcaaagagtgaagttcctgaaagagttgattgggttcgcttatcggcagtccttccatgtaccgaaagtgaagaatatggagacaataaaagctaagcccatgtgctttcgcatcgcttgatgccctctggaagattatttcgctgcacttgagcgaattcgattctactcgtcgcattccagcttctagtgaaatgtcaaataacccaatatggtattttgcctatggctccaacatgctttcggatgtcttcatcacgcgaagaaaaatccagcctctcagatccgaagttgctctggttaaactgcaaaccctctgtttcaacataatgggcgttccgtacaccgatcctgccatggggggcttgcgcccagctgaggaacaagatattccggtatatggcattgcgtacctattgtctcccgacgatatgaggaaggtgatcatcagcgaggggtatgcaaattctagaatcctaggcgcatgactagctgaagtatatctaacaccgtagcagaggtggaatcgcctacaaagccgaggtgtttacagccacgttgcaaaatgatgcgtcagaagtgagtgttcatttattggtgggaagacacagtatctcaagaagctacgagaggcttccatcaagaagatatatggtaaatttatcccattacctcgttgcatggttctggtctaacttaaattcacaggatctgttgattcgaggtgcccgtgaacattctctcccggagtcttaccagaagagacttttgtcacagcaaacattcattccggggcaaagttgtcgattcaaggttggaaaatggctatttgacggattctggcaacggatcgcatactggattgaaaaaggagtttacaaattcaaagatggcgaagggaacgttccaccgtggttcctagtcatcttcgattttctcttatggattatgtggtattaccatgactacgtccacagcgtcatttggggcaggggtgatggattgaataggaaatagaccagtgaaataaggaatagattttgacagaagatcaagattcaaattcacttgcttttctccggtatgagggctctaggcaaatccatctctgcatcaggataagcccctctcacaacacctcggaatttctcgttccacagttgcttcactccatcctgcatgattggtacttgagatttgtttgaagctgattgcacttccacatcgttcaatacacggatcacattaagccctatgatcttttccacatccgatcgggcaatcccacgctccagcattctgcgaaccaaatgaggatatcgagcgacattctcaattccttttacagcattaaacataccgtcatagtcagatccaagcccaacatgatcgtagccaatattttgtccaacatgcataatgtgatcaatgacatggtccatgttcccttgggtgggatcaatgtgagcaagagagggaataaatgtgatcataatcactcccttgttggcttttagtttctcgagaatagcgtcggggacattgcgaggatgtggaacgatggaggatctgtacgcttaaggttcagatgggactttcttttgcagcagtctggctgagaaatcgcttgggataacttacgtcgacgagtgagagaaaatcacaggcgctttggaaatatccaacacttggtgcatcacagattcgcttgtatgggagaggtcaatgatcctaattctggttagctttgtgacttttgcgggagaatatatgttgacaagatcattcttacattccaattctgttcatttccctgactatcaattcgcccttagaagatagtccgtcatgtgctggagatattgcggtctagtcattttagctcctgtcacttgttcgttaattggttatcactcactgcgctatctgcgtacagattattcttattgtgcgctaatgtgacatatcggactccaagtttatgatacaaccgaagaacactggagctgtttgcaatctgatggagcccttcgacgccgattaggctagcaaatttcccatcagtgaacaagcgcatgatatcggaggcacgatcaacgagacccatgtggtctgaatacaaatccaccagtcgatgcactagatcgatttgctgcagtgtatctctcaacgtctctaggtgtgccgcatcgtcggtgaagtcgtctgagtctgggctaagaatatcatcagctgaagacaatattgtaggtcgcggtatccaggctaccagtctatgtaaacactccagaaggcaccaccagatttcccttctctgagtcgcttgaaatcaacatgtcccactaggtccttttccggatccaaccgaatatccagttgattgtcgtaaaacccgcgaatgaggtgtggccagtcgttgtgtccatctaggtggattgtcagccttggggtctcgaacatagcccactagcaggacacacaccaatcagtgggactgaattcaggatatcgatggcctcctccatagacatgctcgtggagactagctataattagccaagcgtcgaatgatcccaaggtccgagagcaacaagtgcatgaaagagattattgatcggcaagagaagcaaatgaaagaaaccagagggagtaatatatttcaaaggatcaaggaaatatttgtcaatagtctccgacaaagtctccggggtcgaagactagactgcttcccaaggtactcactcgtgttatatggtgaggccgaagggattgtcaatgctagaccaaaattcttcatccgtccttttccaaattcatctgattttcgtctgtccagtgggagaatatcagggcccctcacgatgacactgaaaaaatgggtgccaccgttccacctaggtgaacggttgggccctaagaccaatcttcgtctcattcttatgacaacaaccctcgtcaactttttggatctttttcaactctcggcagtgctctttggtctcccagacattgaaaaggcgttaggttttactagcgaggatatcaactgggtgcttattgtttacaacattaccttcgccgctttcctcctcatcggggggcagttaggccagagattcggtctggagaagacattcatttccggagcagcaattcttacggtgtccaatatcatcaacacagcggcgccaaacaaggcggctcttcttgccggtcgggcaatttcagggattggggcgggattgactgtgagttgtcgagcacgttgaaatgctccgttgcactgatctaataagtatttcgacttttctcaaggcaccgaacggacttgctatcctgagtagaacctttcccgatggcgatgctcgaaacaaagcactagcaatctacacagcttgcgccccattaggatctaccattggcactgttgttggttcccttctctcatgtatgtcttacagtccttcctcgccagcaattgaattttctgactggaagatctttagcgtctgacgccggctggagatctatattctggctgtgtctaattctcaccggtctggcacttgtgctagcttgcctatttttaccaccctttgccaagacaaacgacactccaatcgatataatggggagtgtagtctttgtgattggaatcgctctactagtgtatggtctgaatgatagcccaagaagtgggtggtcttcagcacctgtccttgtaggtatcattctaggagtgtgcctattaggtgccttcgtctttattgagatgaaagttgccaacccatgcattccaccatatgtttggaaaagcctccctttcttcctcatgcttgtcgctatctttgcttttggtggcagttttagttcgtggttcttcattactacacaactctgtgtcaatctactaggctacacaccggttctcactgcggtttattttttggtaagtctctcgacctcactccaactccactctgctccaagtcaaatattattgatgcagaagcttccattttgattggtacctggctgacgcgcgtcattgaatagcctggtgcattctcagccattgtcggcggagctctatcggcacccatgatcaagcttaccggggagaagatgactctggtaattgggcttgctattacagcggccggtgctgtagcttgggtatttgcaactcctgaccttgcagggggaactggccatggtgagggatactggtactccattgtggctgcaatcatctttgtctgtggcagccctgttgcgatggttccagcccaaagcattctgcttcgtcaggtcgaagcatccaaccatgctatggctagcgcactgttcaacactgcttaccaagtcggggccagcgttcttctagccggtgccaatgccttcatgaatggaaatcgcaagcccattaatggcatcatgatggtctccatgactggatatcaaaacgcattttggcttcttaccggagtccttggaggtgcagcactcgccatagctgtggcttactggcctcaaaaaacagatcaacagccagaaagccttatggaagaatcgaacccagatgaggagcaacaaataatgaaggctcagtgaatcatatgacgcgctggatcaccacaccagatatcttaatttttacaatcctacttgtcagtcaagtgatttatatctgttcatttttctttcttttttatgttcgccctttatcatattagttgaaaattctttcgtgcatctcaagcggctatctctcgatattttctcgagccactagttcctctgtcatccatacccatttccaatgttccctgtatgtacgatcatttaaatatactatggcggggcttcacatgtgggtagaggtctacgggattacgctattgtgcaacagaagtttaaactaaattgctgatgatatccaacccgggcggtaaattggcaaagtaacaaaggcttgaaagccacaaagggacaatggaggtcttccagcccaaatgaagaaaggcaaatccccggtgtcaacccaataatatcaatttgtaggcgtttgtttagaacgccatgttgcgaagttataatcccttagaacttaggcaagattcttcgattgtcaggaccgaagttctcactttccaagaatcctcaagctttcttcgcccaagcgagatgatagtggtagacatttccaacattgcgaagctcgatctccaattcattgcgaagggtatcaaattcctcgctcttaggttgtcccggcttccctattataatgtaattcgggttagtacctaaatatatggacagttcatgggtttgtgatcaacataccactcagcattcttttcattccatcaagcagatgaagcaaaacaaccacagccctctcgccttgctctggatcctctgatgcggctccaaccttgatgacctgaacactttcttggatgtccacagcaccagcaccctgtaaccattgtactaggaacgatcccgggctcggctggttccctatggctgcccaagcattgaccatgatgtcacggaacttgacgaatgctgcatgctcaggcccctcctgaatcgaaagcatgttcccttcatgcaactcaatccaaccgccgggcttgacacacgagaacaacagcttgacagcctcctgggcagtttgatcggaggcgactgtaagaacaaagcgctgatggaccacatcaaagctgttttgaaagtcggcaggccaagggtcgaatattgagtgaagtgaaagatgtaaattcgaaggccgcaaattctccgggaggaagtgctggggggcgatgtcggtgccataaagtgatgtcgacggggggaccgattgggccagatccatcaaccatgtgccctcggcggtggcggagtccaggatacgaaggtttggctgcttgatatccacagggcaatacagaagctttccattcattgcagtcttcacgagctcatgttgagttcgtaggcgatcgtactcaccctggtggcggggaccccgataggtgtctggagggttggattgtgtcattttgtgctataaaagaagaagatgaaatggcgagagtgaattctatgattagagcgagaaaagagatcgacattgaagacagacgctgctttttaggaactttcatatggtttgaaactcagacacatttcggcgactatcactcaatcgaatgtagagaaaaacatactcgccgaggctagtataagaagcacacgacacatgaaaggcccagaatgagctgtaatcattcaatcgtttcttaattttctcttcgcttgtccagttgcaattgattgccatacgtgatgtcccagccaagcgaagatctatccgtgcggcctcaaatccccgatgacaagctagtcttgtacgtcaaaaaatgtaagaaagtccaacactacggtcaaaatccatggcgaaatccagtcaattgatcttgtatcccttcatttatgatcgggatgagccttggtcttcccacttttacggctactaactgcctacagcgagtcccacatccacggccaacgccgtgaagccgctgatgctcattcaggccctgaaaattcctcacgaacttcatatcatcaattcaaccagcaacgaaacatggtttcactcgatcaacccttataagatggtccccgccatggaggacgtcgaaatttaccaggtcaacggcaagccgcagcggctgaacattttcgatagctctgcatgtctaacttacctggcggagaagtacgaccaagagggactttacaatggcaaagacctctgtgaacgaaccattgtcatgaactggttgatgtcctacactgcggggttgggtgcaaccggcaagatttggcttttgatgaaagcaccgaagccagtggatattggcgaatctctttcggtgttgctgaaatacatttgcaccgagtatcagttcctggaaactcggctgaatgaacctggccagcattacatagctttgcccgacagaccgaccattgcggactttgccatcttgcctcttgcgaatgaaactatcgcaacgtccgccaagctggactttggccaatggccaaaattgaaggagtggagtgagaagatgagagagctaccgccggtcaaggaggctttgaatagaatctctcggattggattatccgatgaagagctcatggagctggatcgcaaagattagaactctattgctgtgttcaattagtactccgtatttaaatctcattgacaaggccaggcgcttgagaatatctttcccttcgttattctgtagtcttgggcctactgcatagggacagaaccaaaaggcagaccaaaaggcagactataaggcagaggaaatttgttttcctgttgggatcacgtgatatgcgtcatgtgctcccgagagctttgcagggtttgcatattctcaaggcctgaggcatgaacgcggcacttttggccaggttgatctgccgagcaaatgcttccggggcttcaatgaggatgcatcctaatccggaccatcgacttctctcaccctactccgtactctctctgacttatgaataccaacctcagatggtttgtcttcgtggccctcaaacatttaaaccatcgacgttcttcatttcccttcgttctccttcatacttttcatctatccacatttgacctttcttcgccatcaaaatagtaaaatggactatacttcaacgtccgctgaagaagggcagaggcatctgctccctagaccaagggagggtattcactttttttagatggaattgtacatagatcagtatgtgtaaagaaatatatcatagtacatttgaatgtcaaaacaaatatataattatatatgatgtgaatctggtctatatcaggatggaaaactaacgatatatacactactggagtatcaaattgaactgcaactaaaagagagtcgaagaaatagatggaaatggacaggaaggacttttgaaaatgtgttgttatggttcttatgctcttaggaaaagatcaaagaactgtatggtcgattgtgaaagaaaattacagtggtgtaggtcgaggttgatcgttcattcccttgtccctccagcacacaggtttcttttttttccctaaaaaaggaatagaaaaagtaagatagagtaaggtcgaacgttcaagacagaaaaggagcattattattttaggaaaagaagataacagaatcaatgtattaatggtatgaagaacagcatataacagaaggcggtgaagatgaaatttggtggggaaagaggcagaataactacctggaagcggtgaacgacacaaacgtcctgggcttgccgttctagagaagatccagtgcgatcaaaacggtgttactttgagaaggcaattgctgaggatgtacgttactaggtgtcactacctgaggcatcaactatagcaatgagtttacagaaagctttgtatgtgaatttaccattttctcattgcttcattttcttggctttaggataacacgcgcattggcaataggaacccacgtatcctgaatgggttgcgagctccatgtcttcttggcatctaaccttggtaagtcaatctcgtaccgatttagtaagtggtagacgaaatgtttcaacatagcctcagcaaagtgttgtccaaggcacctccttgttccaaatccaaatgtgaagaggttgtaacggagctaggcagtatgattagcaaaattacaaagtaagctcgtctatcacttctcacctccgttgaagacagatgctgaaaccgatgtggattgaagcgagaatgatcgttcccccaaaatttctggttgtagttgattgcaagtgtatccacaacaacgctcgtctaatgtccaaattagccttcttatttaggtgtgatctggatagaactaacgtgtgatggaataatatagccaccaatgatttttgttcgtggtgagctttcggggatcgtgaatactggtcacaatcagtcagcaagtatcgactggttcttgaaggaacacctcacttgtaaaagggcgaagcctagctgattccaaaaagcaaaattgcaacagcgtatctttcctaccacagagctctgcgagagacccgggatttgccgaaatttccgcccgaacttgttgctgtatgtcaatatcttcagctaagaagatgataagccagctaagaacgtgtgtggacacgtccaagttggcgaaaagcatttcactaagagtctgaagtatctgtgatccagtcagagtccgtgaaggaagtcagaagatcggtcatctcacctcattcatcgaaatacagcccttttccatcgccatccaagcctcaacgataggtggctggtggttatttgagagagctcttgaatttacaagtctctggttgaaattttgccattggttttggaaactcctcaatcgtcggaatgagtgtggcctcatccactgacacaatccgaagcgatacactccaccggaaagaacattccccataagtgcaaggctttgttgacccagattccacagctcttccttttcattttcagtcaaaggcccatagagatattcggcggtagtcatgaacggaaagcgcgagaaatcactggcggcgtgtacctcaaaggactcagcatcctgtctctcaaggctctgcaagtatccagttgccgcgagctcaatatggctagatattgatgacacggagcgatgaatgaaatggtgcttaaactgagcccgaacttgttcccaacggtccccgttgatgaggcccatacagtcaccaagaagctcatggaataaccatccgccgttgctggacttggatttcaggtgggaaggagagtcgctgtgaaagatcttgacgtcgtcgggtctcgtgattacactgtaaaaggtcaatattctgtcatctctctatatcatcgctgaaacacttgcacttcggggagaacgcccgaccagatgcgatagactggcccatattgacgccattctaggctggcttcacgtccccggagaaatttatcgagacattgcccatcactatatttccatcttgggcctttaatattctgcccatgctcatttcgaaggggatacaacaccgtcgatatctgggatttcaaaaaggtgagttgcaaaaatcggtcattatgtcttagggcagaattctcacaattctatcaataacatgatctttcctttggtaaagcttccatattattactataccgaggaaaaggtaaataatccgagggttgaagaattccatagcgaaagatccgccacgttgagaaggtaattcgcgaaaagtgttgcgatacaattggccatgcgcgatgcccatgggataagtttcgattaggaaagatctccaaatgctatgtgtctagtccgtaaggtactccattaaaaccacacttcaacgaatattctccgaatcgttgattacaagcatcactttgccggggaataaatgatcccgagatcaacgatcggccagtaaaaacaaatagagttttattttcactaccaagaggataaagccctaagctcattttggtgctgatatactatttctagagccgttggatttatcctacattgttgctacaaaggtactcatgttgacgtctggatctcagtctacaaaacacaattcagtcgcccaaaagacaatgagaagcccttgaaaagaaattctaaagatctaggatatttatactttagccctagagttataatatacagcacacatacattagataacttttagagtatcttccattcgactaggtacacagggatggaaagtcttcacggctaatcaacgacaatttccctagtaattcaatgcttgcttcctgggtcagtcttgacattttcaacctcggattgatagtaaatttccggattaaagtaggcagtcacattccattgtccttgatcggaagcccagcaaatgtaggtatgaaatcctagtccatcggcaagatcgcggtgtttactgtgagacaactaatcagtgacttgatctcaaacgcaatcgcatcattcgctcaacttaccatagctttttaaccccatcataataagatcctgtcgctagtgtcctcccacggcgggcaaggtattctgaaagtcctcgggcaatctgctcgtcattttttgcatagtgtcgaacgggcagatatgccttcgacttaggaatcttcgcaccccgttttagctcaaagtagtatagaataccgccggtgcgatgctccttttcacttagaggctgatcgtcaagatactccgcggggtttagatcaaaaaccgagcaccaaagctcccgtagagagtccagctcatcttgtgttttaggggcccttccacctaaacttaacatctcaattacacttttcaaggtcgtgaaaggtgatcgaacgtatattttcaatcgagactgggatgggtccaaacaatcgatggccacgatttcggcgactggtcgcaagttatccgggaatgagtcgagaaattcgttgaagatataaattgaatctagcaacccctttgcgggtgcagggagcttttgaaaagcgtctcgaatgacagaaatctttgtcttctcttcttctaaagctttccacccaggcaagtagtattgtttgacaacaatagacttttccagtagatcaaaggccatgaagctttgtgattgtggaggaagcgatttttgatgttcccttctggccggttcgtttcttgacagcagcaaactttggagatggcggtggagatataaatctaagtcattggtcaaacagagagcatctccaagtaggcgctgactggcggctgtattgataggatcgacttcctgcccagcagacgggccaattggttctaccgaatatcgaaccgtaggggttgctagcgatgtagaccagcaccagcttagctcgactggggtatgatcatccgtcatgaagctcttccagctgtcgggggggccacatcctttaggatgggaacccaatgatcgtgccactgactcccgaaagaattttgtgtgaagcgactcggagtccgaaggatagcccgccataaccaacatgctctggagcatggagccgacatcctctacccataacgatatgtcgtcggcggaatgcttgatggtgtcttcctcagttgtaccctgtcgggatagttaataacttgggccattttcttcacaaaggtacccacacaccttcacgtcttctagtgtccatttccacttaaaaggccaagccctgatataggtcagttctcttcacttcattgctgttgctagttaggacagtcactcacaagaagtttaatagagtgagagccataatattgctctaaagttaccgattttgaaaaggcttctattacccttgggacaacaatcaaaggtaacttatacacaatgaagattcagcaacttcatataatgtcttcggggtattatatcagggctagagatctctgggtggggcatagggtaagccggagtggctcggcgactaagtagcaagtatgtctatcttggtatgtagacctttccgagacggctgagtattcggcccttaagctgttacgaccagaagccctgaatagtgatccacatagtggcaattttgaatcatgtactgtacttcaatcctgtgaagatacacagaagtctttacgacgttgactagtaggaaaatggcgtcaagaatttccgatcggtgcaaaaagcgaaatgctaccatcatacctagtctcataggccagcatgatgctgttctcagcggggacacgactacaattgacctcagtacggcggaaaactgggcgaccaagacaaagttgctgcaaggcctcgaaggggtattcagtggcctgtccgagaatgtatgattgccaaatccccgcaaagtcaccatctttagcatactcacgcctgtcgtcaggatttggcctactcatctggcattggtggttgtcctactacgcgacaactcattgcagacttgattaatgaccgctttcaaccatcaatccccgttgaaaactctcatgtcgtcttagcggcagggggaagcttcgctttgacagcacttattgagcaaatctgcgatcccggagatggaattctcattgcgacaccatactgggccggtctcgacatttccatcagtgttcacgcccatgccacagttgtgcccgtccatataccgttgatcgatttcttcagcacgaatagcatctcacattatgaatcggcgctggaaatatcttcaagtcctatcaaggcagtgctagtctgcaacccccacaacccgttgggtcagtgttacccactggagactttagacgctttgctcgagttttgcaagcgccatgagctgcactatatttcagacgaagtatacgctctctccgcgcaccagccatttccgggcggtttccatccatttgtatcagcacttcaaaggggggatcgtgaaacgagggctcaggttcatgtcatatacagcctcagcaaagatttcggctgcaatggaattcgcatcgtgagtggctctttggtgataccagcgaagcaagaatccatggacattactaaaaagacattaaatgcagggggcgttgattactcaattcaacgatgctgtgcgccttagtagcgctttaagcgttcacagtcaagtgtcctcgctgtcgacggtgctggcatcaaagacgatactgcagcccaccaacatcgacacagcaataagctatggggctcaaagtctgatggggtcctataaagtgattcaatccttcctggagaatgctggaatggagtatataccagtagcctttggtatgtttgtatttagtaggcttggcagagtcagcaacttcgatgcagagagaaagctgctgagatgtttgaagtccagaggcgtatctgtgtcatctgggtcaagttatcatttccaggagcctggttggttccgcatatgctatgcagttcccagtgatcagttggaagagggtctcaggagaattggtcttgggattcaggatttccatcagacattcaacgtggacgaacaatgactgcgccggcttagaatgaacttgaaaattgaagcactagaattacatgagttttctcttccacttaatctaaattatttaaatcggtgcgtttagtggtcctgcaaacagacaaggcagaaaataaatcagtctcacatctttcagagcttcctatgtaatgataaacgagttgaaaactattatacagctgacaaaatcttcatcatcgtctgcgcgatgatagcaacggtttccgaagaaaccatatcttccatatattcaaagtcgcacgtcgtatgttgtttctcttcggtgaactcaatcagaagtgggaactttgcacctgttgttttcaacactccagattccacctcgacgccagggagtgaaagattgtttgcgttggagtcctcctttctgttatacacaaccatcacttggaagatttcgtcttctccagcaatcttccgaatgtctttgagaggaattgagtgcatcagcgcattttgtatcgatgttcgcaccgtttttatcagactttcaaattcgttcaaacttccatcgacgcgcactggtaggcggtcaaggaagcagcccagaaggctttcggtgccaggctcagtgcgatcaacatgcggtatgccaacgatgacatctcgggtcccttgaacatttgcaatcgcttttgcaacgagagcgacatagacttccatagatccaaagaagcttggtgaggttctcagtacaatagactgtgagtttccggcataggttctcgaaccctgcccaagcgattcaaatggagggctgggtaaattcagtaggtggtctcgccagtatggagcatgtttggacagcggtggttggttatacttctgccattgagcccaaatggtgtaatctggagtctcatgtgcaggagaggtgacatctgtttgaggatcactttccagggaccggcgatactcttcctgtacctttttcagaagcaaatttatggatgccttgtcggtaaccgcgtgatgttgcacaataacaagatcgacccacgaaatgttttggttaatcatgattctggtcaatggaccagatgaaagatcgaattttcgattggcgaagctgctgattgggggattggggatcttgtccacgatcatctcggaggaatcatgagattggccacgtacgatttgaccatcgacatctttgaaacagcttttgagaactggttcactggaaataactttctcgatggctttctggaagaattccaggtgaaggtctcctttcagtcgcagatgagaggccacattgaaagcttgaggtgtgggcgacgaggccgacaagtggaaagcctcttcctcgatgttggaggtagctgtatatggtggcttagccgtttgccaggatgaagagaaagaccgctgggtatacaactggtcttcatcagatatatgatcagttatctctttgcacaacgccgacagcacggtgttgaagataaagagccccatcggcagctttgtgttcagtattctactggcaatctgagcagcttttatctgggaaagggaattgcctcccagtgccaaaaactccgactcttcgccaatttcgacagtttcaggaaggccgattgcctcacgccaaacctgggctaccagagactgagtcggcgtcagtggatctgggctttgtcgtttttccagattcaaatgggactgcaatgccttgcggtcaagtttttggtttggcatcgttggtagaacagaaaatgccacgatggtcgaagggcaagcatatctgggaagcttcgttcggagggcctcgtgaagaccagggatattaatattatctggctcaacaaatgcaacaatgttatcgccactaacaagggccaccgcccggcgaatttctgcacagactgtgcgaatggcgttttcaacctcgctcaattcgacccggtagcctcttatcttgacctgattatcatatcgccccaaaaatttcggctccatatcctctgtccacacggcacagtccccagtgcgatacatgcggtgtccaggcacaaatggatccggaatgaagcgagtttgcgaaactgattgcatttcagctccgatgtaaccattagcaacttggatcccactcagacagatctcaccaggcacaccgatgggaactggctgatttcgcgaatcaagtaggtagactccaacgcgaggaatcgttcgccctaatgtgacttcttcatgtggactgagaagcttgaacaagcacccaatcgtgcactcgcatggcccatacgagttgtagacagctttagttcctgcccaacggtctgcaagaacttggggcaccgcttctccggcaaaaagaatggtgtcaatattcggatagtcagaaggttccaaaaccgagaggaaagacggtgtgatcatggtcgcgtcaacccgtgaaagatgggaaaatggatccactggatcggccaagacgagagtagctccatagcagagtgttccaaaaatctccgcctggttgacatcgaatccgggtgaaaacatttgtgagtgtcgtcgacctgggcgagcatccatgcgagcaggtccataagacaaatatgagaccactgctcgatgtgggatttgaacacccttgggaacgcctgtggatccggatgtgaatgtgatgtatgcaaaatcttctcccattgttactgtctcaagtcggggacacatagtcgggaccgtatcccccaggagttgatgcaacaggatattgtgttggaaaatatcttgaaatttagcctgacagttttcgttgggaaagatgcacagtttcaccctagccgacttaaccatgatgcgcattcgctcaatgggtaattttgtatcaagtgggacataaatagccccggatttgatcacagcaatgacggaaatgagccattcaatgccacggtcgctgattatcccaacagcatctccagggcaaacgctggctgcaattgttttggcaacataatttcccaattgatcgagctcccgatatgtgatactgcgagatgtggattcaattgccactgtatctggccacttatcgacaccaatctcaaaactgtccttgagattagatggtcccacatacgggctcataaaagtggatgaattggtagtcagggaaagaagctcagttggctccaacatccttccgcacacctgggatattgtctgacaaagcggatcaagcaatgcgacgaaaatgtttcggaaatgtatgatcatgcgctggattaccggtctagtatacattgtctggttgtataaaccatggaacgtgagacggcctccttctcgacggatgaggacggttaatccaaattctggaacgtcggtacgggagaatttccaagtggagtcttcaaagcctggcaagttgtactctaggaaaagggcggtctggtacaccctggtgtgacttccgggcataatggtctgcaatgcttcttgtgcagaccactggtgagaaccaatgtcaagcagcagggtctgcacgctcgaaaggaagttctgtttgcttttgtgatccaagaggctcattgggaaggggcaagtattcagcgtcgggcccacaagggagtcaatcccgtggagagggaagtcgcggcctgagaacacagttccaaacgtgatctgctcttgtgctgtataagaccgtagtagaagtgcccaagcagcatgtatcattgcagccgatgtaacattctgagttcgacatatctgctcaacttggtctaattcaagctcaacgttgacagtagtaataccaaaacgttgctcttccattccctcattcggcttaggaaggctcaatggcacagcatcggcgaccttggaaaatgcttccttccaaaaagccacttccttatcctgtggaagctgagacctttgtgataagcttcgcgagaactgccagaattgagcaggtgtgttcttcagggttccaccctccagaagcgtttgaacttgttcgatgatgttactcatagaccagccatcaatcaaactatgatgaacaagccatagcaaatgtgcattgctcttgctctcgttcacaagaaggcgaaaagtgttaagaggacggaagacattactataatcgacatgtcccgtgcttttcatcagctcgtcggagtgattcaggagagctaatggtgcatcttcatcagtcacaaaatgtgtttcccagtcatgatgataagtagaaccaactttctgtttcccctcagtgagatcaaaagtcgttctgaatatggaatgctgctctagaactgctttccaggcattgcagaatatgtcactgtattccgtggtggaattccaaggaaaggcgatggtgaccagcatatagctcgccgctgaaaacttaatggaagatcgaatcattcccatctgtgttgtcgtaattggggacgtaacggaggaatcgctatggacggtgtcccacaagggcgccaatggttcctcttccggcgcatcagctttttccaggagctcagacaggaggaccagagaaatcggtgtgaataacccctgaaagtccactgtgtaacctcctttcctgagaatcgacaatagtttgatagcaaggagagagtttccaccaagttcccagaagctgcaagaagtacccactgagccagtagaatgccccaatgcttcggcaaccgcttcttgaagaatttccaaccgagtgccgctcgtggtgttagaggaaaatttggtagaaatgctctcaaaagtgtctcgcaaccttttcaaatcgactttgccgttggaggtgcgatctagctctcggagggcgatgatctgatcaggaacaacgaactcatcatgtgacagagagagttgcagtcgcatctccgtgccgtcaatgctttcaggcgtgacagctgccaccaatctacctttgtacatcagggcggctgccgactgtacctcggggtaggaagtcaagatgggcagaacttccatgtcgatgttaatgagataacctcggtttttcaccatgctatcctcacgtccacagaatatgataccctctggtactctgtgagctcgatcaagggtccggtacaatcgacggcctttccaggtaacaaatctctctgcagtcaatgcttcgtttttgtagtacccagatgccaagccgggtccactaatacagatctctccttcgtcagattcttcgagatgttcgtcaaggatgagcatttttgtttttttcatcggtgttcctagaacaatcggatttccaggtcgcaactcagccatactggtacaaatagtggtttcggttggcccgtagcagttgaagattcgccggttcggactccaccatctctcgatcaaggctgaacttggagattcgccgccgagaaagatattcttggcccgggaataggcttgaggatcccccaatgtaataaggagcgaaggcgttgccggaaggattgtgcaatgtttcgcgtcctccaaaaccctttctggttcagacaggactaaatgacctccatggcagaggcaactgaaaaatacaccccaagcagctgcacaatagagcttggattagcatatcgtgacagagattccctggatttctcggttccacttaccatcaaaagcgaaagagaacaaaagcagaattttgtcgtctcgaccaactcccaagttgaaaggcatgcctctgtcccatccttgcagaacatagttctcaacacatcgacgtggaataacaacacctttcgggctcccggttgtccccgaagtgaagataatataggctggatgttcagaatcaccgggagtgtcgagatctctggtgattgttggaatttcggtctcggtaaatgaggcattgtaagtcaagcgaatggtatctgcttcaatcaccgagtaacgcgcagaattgagtcctgtcttttcagacttgaccacaacttttggctcgacggtttgcagaactgcatcgactctctgttggctccaagagctggcatccataggcaccaggcaggcacccagtcgcatcaacgccaaaatcgatgccacgctctccaaagatcttgagagaaatattgggattgaatctcctgtccggattccatgagaatcaaagagcgcggctaggaataatgaggctttgtcgagcttttcgtaggtcaagcttcggtttccttgagagacagcaatcgagttcggctgaacatcagcatttgccttgattagagcacatatcgaccgaagccggtggtcttcccccgaaacggctggtgactcgggtgtagcgtgtggtgtcatatttgataggcgggtcgatttccagtagacttgcgttgagaaaggctggggtcttagttaaaccctctgtattctggactttgccaaaatattactttgccaacggcgactaagcttcggcggatatttttcccaattagccggccaaggttctccaactaccgcgcgtgagcctttcgttcttttgacaagactccggtttataacaccgttcaaaatctccggcatacagtctcttttcagttcctaaaattatgtatcgtctggcagaaacacatcgaaagtccaacttgtcattcactattctaagtaggcctctaattcgtgtttaaccaaacagcggtttctgtccctgagcctccgccgcaatcgctgtggagactcccatcccagccagggagcccgaaaagatggcatggggaacatttttcatcagtccacagttgtcacctgccgcaaatacacccttgacggtggtttggtagaagggaggggctattttgatatcaccgctaggtgtcagctccaggccaagttgctctgcgaaagaaccgcggggttttgtatcgggagtgtgcgcaaggaatccctccgtcacgctacttccatcttcaaactcgagaagtatactcgccttctcgtcttgtttggacaggctcttgattttgcgagaatcgaccttcatgacagttgaggtcccaaatccttcgctcactgctttagcgagatcctcagagccgtttgtgtagattgtcacgctttgactaagtgttgatacctgtcgggcgacgtgcagggccgaggggggcttggaaagtccgccaatggcaagcacaccagcggaagtgcatcctcgctcttcgtagcctttacagaaaagacagtggaatctagtaggatgatcagtttaaatcggctcactatatctatgggtatgttggttgcatctcacattcccttgccccagcactcagcatagcccgggatatcggggaagacgtcctcgacaccgttgcacagaatgatcttttttccgttccacatgtttccagtctcatcggtcagagagaagcctcctgactcgtcctttcgcacgctagaaacggctttattcttgaactggacatggtcatagttcgagagaatattgttcctggctttctctcgatattccgagggtttaacatgatcaaatccaggaattaaatgcatatagtctgcggggtcatttcgataggttccagcatcgaaaacgattgaattctgttgttgacgagccagagtgagagccgcggtaaggcctgctgggccgctaccaatgatgagcgcgtctgctgaagttgccatttcggatattgagtttgacttggtgatcagaggaatttttcgtttggtgtacgatttttctgtcgagaatgtcagagagagctaacttcgtgctaccggcacatctatcaagtatggtccaagtggcaggattcggaggttaaaagccgacatagtgcccggcggacattaagttacgtaggatagccctcgatagctcccatttgtcaggttcatcgggcctatcgcatatgcgaggaatatctagcgcgcattgcacgtcaccaaggtccccgtaatctatccgaggtaggtaccttggacgacactgacatccaatcaagcatggcgtctctacttgggatttggattttctttgctgttcgctggtggtatatgctgctcacttctatagtatgaccgtgtcgagatttccgtcccgcccttagcgatattcatttgaacgcacctacttgccggtagtgtctagtttgtaatttttaatacgtggagttgtgtggttgaagaaccttggaatattattgacaggatttatcattctcatatatcgtatatgtgttctaaatgctaaagcaagcctttcaagattgcctgtctcacgttgtgctgtaattatctagcttcaggcttttggccccaaacgaaatacacattaagggcgacgtgatgttcgtccatctccttggcaaaccgctcgggcaaagtcttccattcttcttcagtcattccaatcatctcaggcctagatctcgttagatattgttttctttaaagcttccccagtgcgaacttacttggccaccgattggaagaatcccagaaccgacaacatgttgcgttttcctcgcgctccgagttcgggatcggaatttgaggagccagcaaccatttcaattgccttgtatcccacattcacgagtccttcgtcattcaatcgacccgcaagctttgttgaagcgagtgggtctgaaaccaccgtactggtcaatttatggaccgcctggacagccgggcatgactcgatgggcttggaaaccggagtctggaagtccatttcaacgagttgaatccaacctcccggcttcacgcagcgtatcaggttgcgaagtacgagtggaacttcttcggttttaaacaacgggatgacgaatcgttggtggacgaggtcgaaactgtctttccactcggcaggaaactcttcaaccaggttttgcttcacaatctggaattgagagctgtccttgagaggcggatatccttcgggacttcgaggtaccgattgtgagcttatcttatgcaagatatcatgacacaaggttggacttgtaacttacgcgttgtcaaagccaacaaactctgcatctttggggaaaatagacttgacatcctgcatccaataacctagagagtattagcatcatcaattcaacatgcagaaactggtccgataccatctgctgtggcggcgtcgagaactcgtaaacccgaacggttcaagtcaattggtgccaggatcaatccattggcacctcctttcagccactcgtgctggttttgcatccgctcagcttcctccaagttccgtggaaggaaatatctgcttccgacttcttcgacattcttatcaacggcctgggcttggctggagtctgtcatgatgctttgagttttttggttgatatcaagtttcgacaatttgtgacaagtcaagaaaccttttagtatagggagtgtgctaagttatataaatatttcatccatatcttaatatacaccacctattcagggtgctgtgggtacagcctcttagagccattatcgtaacgttcaccaggggatttggagaggccggagagtaatcggacccaaaaaaaagcatcttgaattctccgatatccatcaccttggccaatgtgtacagtggcttccagggagcggagaatattaaaggggtgagagtacccttgaggccaggcccgtagataactaagtcaccgaagctgagtcatcgatatcccttcccgcaaggttcggagcgggggtggggaagccccacttcgatgaatactaaccaatcagaaaggttggtactgccaaggtgctcgttcagaaattgtttgcactgtatgcaccgtttgccctgtttgtatgacgtctccgtgattcatctgagaatttctttcacatggatccaagtcatccgtccaacttcaaccgtctgacttccacgcacacaaacaccaacgggagcactcttcaattcagggaagccatctgcttcaaccgaggaagttttccatgcggtacagaacgaaactccagccagtgcttacgtgcctcgattctcaagttgtggtggagtgaacccgattgtccaaggatataccctacttcttctagggctcctctctcatcgtcgccatctcatctcgctgcaagacacaagtgcttgtgatgctccctcttgaggataaacctatccaagtgattcaaaatttatattatcgaaaatatgcccgccaaatttcaaatgaagatcatggatgcgttcagagactaatgcatcagcgcgggtgtttgttcagatgatatgggaagggcttgctcgacgtgctcgactactactttctttccactatcgatatagagcctctgcttcctgtgatcggaccttcgctcattcgaggtcagctccgagagcttcctgcagcttccacggaagagaatatctcatccagagagagaaagcagaacaaagaataaccttgcagaattactattcctctacctcatatgtgttgcttgcgtattctacctactttgaattcatttctattgcctagtacggcacccaaaatgggcgaaagaaaattcatacaaattatctggagataatgcatgtcccctatggcagaagtttcatttttcatgccgatcaccaccatgcctgccatcaacctatctaggaatgcaatttttgtatatatcctgacgtgcgctgaagtctcgaatggtaacacccaaagtaggttgcttctattaacgatacggtatgctacttttctcaaggctacagctagtttcaattcatctctttttggtcaattcgcgaataaagatcttcgcccccaaggtcttcaactttaagaatgatccacaaggtcccccgaagactaaaagatacctttctaattttttacatttcctttcgtttcttaaattaacaacatcaagtgtggcttgaattttgatatgtctaaatctccagagtgcaagtcccgtcatgctatggatatagatgccaatgagggttgcgacaacaggtattcttaccacaatcgaagaacgtatgttccctcaccccagttggatcttgaatttcctcgctggatcatttatttaacgagtcaatagagcggattttcgagtcttacccctcctagtattggggtttgctagctatcagcttgacagaaccaacattgccagcgcactcacagggaattttgcatcattcatatccgtcaaccaaaacattattaatttcggaaatcaactgatgttcctgggtgttattatacttgagattccatcaaatattattctacacaaggtatgtcgcatcaatttccggatgattccgtctgattgagttgaattagattgggcctcgccaatggatcagtggacaggtctgcatcttcggcataatcgcatgtttgcaaatatttgtgcgcaataagttgggcttcctactcactagaacatttttgggtcttgccgaagctgggtatatccccggtgcaatgtatactctttccacctggtataccaaggaagaattgacaaaacgtatcgccatattcttctttggtatgtttggcggaaccgctatttctccgcttcttggggctgcttttttgaaactggacgggaaaggtggtctctttggctggcaatggatcttcctcggtacgattggggctggtccctcaaacgtcgaaatatgctaacaaatatgtagtcgagggtttattctccgttgcggtatcattcgttctatttttctttcttcctgaacacaagaaagtccctgtgtcgaccgatgaagtgaacatttcggagtctggaggacttcgcctaacggagaaaccattggcccatcctggcaaaacgcacatatcacttagcttggtttggaagacattgacaagctttcaaaaatggccgcattttattgccacgggctgtgtcttcgctacctggagccctctgacaacatataccccaagcattttcatggaactggggtttccccgagttagggcaaatgcattgtgtgcaatcggaagtttgctcactctccccgtgattttggtttttgcgtggatcagcgacaaatcgaataagaggggccttaccgtcatcgttgctatcttcgtgtacttgatcgcgttggtaattctaagaatcgcagttcaccatgtggataaatggggcaagttcggcctctggacaacagtcaatgccctggctgtgggctatcatccaattcacaattcttggatccaaatcaactgcaagagctctgaagaaaggaatataagtgttgcgtgagtaaaacctgtcctattgggcgttcttcggacagatcagctaacactccttcaacatatagaatgtgtaagactactacctctatatcagacaggctttttctttactaactcaatgaagtcgtcatgtcagctacagcggggctcatggcaggaacccagatatttcgggcggacgagtcagctatattgtaagtcctatacttgcggattataccccattcgtaccactaatgctaaatctattaaccttgtagttatccaagaggggtgtcaattatgattggactactagttttgggactgattcttgtatccctacaaatctcgatattctggatcctaaacaggcgtatcaaagcaaaaactggcaacggggtcttgaacattctatagtggccaggatagcggtcttgtcgggtgacattctcacatatatgatcagatgcgatgtttaaaaatttacaattgactagtagttatgcagggataaatcgacttgaaccatctacgtacaagttctatattttggcttctaacctactcatggtttgggagtaattaggtttgtgcaggtaaacgacaacgtctcatattctataacgcaaaaggcatatgtttgatcctcgatatatacaaagaaaataaattatgcacaataatgcaacccagtactccagacctaacatgatatcgtgtcgtgcaaggccatcatgccaaatgcgaatccggaatccaaaagaaaagtcaaatattgcctttctgcttttcttttccaaaaaaaaaaaccttgaccctcatgcgttctctgcgtgtatggttccctctgacttccgaccgtaagggttctcatccgcaatccagtcctggtggcgttcgggaatctcgtagctgctgctcttccagggaacaaccttgttgacatacatccagtcaagctcctcaagtgtacggccctttccttcaataacgaagaaatagacgacgccgatagccacgaaaaggcaaccagcgaagacgtatccataggcaaagtcgatgtccttggtgatgaaagttgtgaaaaagctgatgaggaagttccacagccagttcgttgcagtagctaaggccatacccttggcacggtactttgaggggaagagctctgcgacaatcgcccaaaccatgggaccccaggtcatagcatatgccgcaatgaacaagcaagcgacgacaatcatacccttgccagcgttgggggtattggtaggtgtttccacatccagaacgaaatggccgatggatgagaagatcataaacatgataaacatccagatggctccgtagatcagggacttgcgacgaccgaaattttccacgacatataggccgccaaatgtagttccaaaattcacagcaccaaggatacactgggtcacgaagctgtccgagagaccagcgccttcgaagatagtggtaccctatcaaagaaatcggtgtcagcaattcctcgcaccaagatcccaaaatagaagaaaaggcttgtgtaggaacttacgtagtagaaaaagtagttagcaccgctgagctgctgcagtgactgcagaaccatgccaaggacaatacgatagaacatgcggggggcagtgaggaattcatcccacttctggccctcagactccgcttcaaactgctcacgaatctcgttcatttcttccaagatgcggacatggttctctgggatgccgtagagcttggccagggtgctttgggcactctcggcctttccgtggcgaaattcataacgtgggctttccgggaagaagatcataccgcctccgagaatcagagcgaagacgaaggtgataccgagagtgatacgccactgagcagtgccatccagagtgtgagtacccaggttgatgcagtaggccaagaaaatgccgagagtaacaaacagctggtagcaactgatcatggcaccccggatgtgacgaggtgcactttcaccctggtacatgggcacgagcagcgagcagccaccaacaccaagaccagtgacccagcggccaacaaccatctggtaccaatggccatcgggagaggtaatttgaacgatcaaaccgacgttgaggatcatacaccagagggtgatggaccacttccggcccaatttatcggcgacgggggctccgaccagggcaccgatcatggtaccgatggacaacaaggcgacaatgagaccggagcgcacggtgctgaatttataggaaccatcggcgccaagctcaccataccgctccaagtagttgctcatttcttggaagccagaaatctgacctgtgtcatatccaaacagcagaccacccatcgagacaaagagggccatcaccaaggaccgcatggttatccgagggattggggtatcgatacccacgggtcgcatgtgtttctccataggactattttgaggggacgactcgaggcttggctgttgagcctgtgtgatggactccccatggtgggggaacgattcggcacccatagtttaggttaggaaagaggaagtatgtatctgactgtcctgacgtgtgatatttcgagttgtatttaagagatacaatggactaggagaccagctcagaaggaatatgaagaagagtagaggaaaacaaacccatggggaagaagaaaactcggggaagatgggggaattgggggccttttgtaatccatcaatcaaagggtagagaagaaatttaaacccagagtcgaagtggggagagaattgtggagaggcaagttgcgcgagatgacgatgctcatggctaggtagtacttcatagtataaggtagggtggcagtcaacaatgcagcagcagacggctcgcacagccaccccaccaggggaggaagccatacagggcaggttccagtgattccaagtgggatagccgatgtggtcggcataggccggcaagtggcggattcaagcttataggccaaggccgtgccgaactaattcgggatcagatactttagtcggggccgagaaagagactgtacatcagttgctggatacggcgataaattttgaatctggagaaatcatccatggacagtggggcaaatagaaaacccggctaaccccaggccctcgggttctctccggatcgaagagaaattcatttcctaatcggtatgccggtgaaaacaggagaattatcatctccagacatgggggttaggggaaatgcggagtctggggatatgctacggagcaccaacctgagatattacgactacttcactagaataacattattccttgacaaatgccccatctcctccgtttaaaagcttataaataaagcctaatcccactatcaatcccaaacatcggcaaaataaacatcggcatcctcatgttgatatatcccgatgcgggggtccgtgggcgggtttacggggtcttacataatatcaagccccgcctgggcacacctttattgaattttcaattcatttccaattcaaatgctttctcgcacttttatttgtggcactattgattcttctaccgattgtcctctaactcataatatatgctacgggacaccatgcagtgacctctatcaactctaggactttgagaaatatgtgtgccccagttgtatacataagactgcgccttcccgatgccgacttccgaggtcgtcagtggcgggcatcggaggcgccacacccgttaccctaggtcttacgtcattgaagaattttcaattctttttttttatttgaccgtaattttcattgaattgataatctcgtacgtaatttacattaagctcataattttatgtaatttgcattaatttgaggatctgtttacggagtactccgtattccgtatgtattcctaacattacttcggggtacccaatatcgctttggcaacagcaatggcgtaaatctcgcctaaagcccaaacccataacgcatgccaatgcatccgcaacccaaattccggcatggcttttcctcatctcccaggtacggcggctcaaacgccttgaccaattgggacaagcgtggcaatttctccgcgtttgaattggtgcaggactttccccgcagttgcagttggtctatccagttctagataccccacatatgcaagtgggttggctcctagacgtcggtccctcgaaggctgaatcattggtatatcgcaagcagactaccgcctcgattattccgcggacgacacgggaggcttgcaccataagctcgatgggagcaatccgtggcctgatatatccttcagtcgatggaagaattttgatttcctaatccaaggtgggagttgatccccgtcttggacctcgatccccaagatatatatatgcattcattcattcaaagccagataacaagtgcactgcgaactctaggatcactatgaaaacactagcaatcttatcattgactagtctggtctctgccgaagctgctccctacgctcaatgtggtggaactggctattctggctccacaacatgtgtctctggctggacttgccaatatcagaatgactggtttagccaatgcctcgaatgtaagtgtgctcagatatgttccaatattgttcagtcgattgacacggaaaactccagattctggcagtggtaccaccactctatcggcaacgataagtacaactaagtcgacggctacaacaaaggtaaccgccaccagtactagtggggtggagttccccactataaatggactagaatttgaaattgatggaaagacaagctactttgccggttccaattcctactggattggcttcctcactaataatgacgatgtggatcttgtgttcgaccacatggatgaatctgggctccgaatcctccgagtttggggattcaacgatgtcaacactattccatcttcggggactgtttattatcaactactcaaagatggaactgccactatcaacaccggtgcagatggcctacagcgcctggattatgtggttacctccgccgaggcacggaatgtgaaactcgtcatcaattttgtcaacaactggtcggattatggaggtatggcggcctatgccactgctttcggtagcagccagacaacctggtatacaaatactgcagctcaaacagcctaccgggcttacatcaaagctgttgttgcccggtatatcaattcgcctgccgtctttgcatgggagttggccaatgagccccgctgcaatggctgtaacacttcggttctttacaactggatccagtctaccagtgcctatatcaagtctctagactcgaagcatatggttgccattggcgatggtatctaggcccgtaatatctctcccatcatccattgtctaactcatattatagaaggcttcggactggacactgggtctgatggcagctatccctacagctacggcgagggtttgaactttacgatgaatctagggattgataccatcgactttgctacattccatctctaccccacaagctgtatgtatatccttttcccatgacccttggtccagagctaatgtattcgcacaagggggaaccactaacgattggggcaatggatggatcacatcccacggagccgcctgtgcagcagctggcaagccatgtctctttgaagagtacggtgctacttccaatcactgtagcattgaggcaccatggcagaagacagcgttgaacaccactggaattgcagctgatctctactggcagtatggagacacgctgagctcgggaaaatcggccgatgatggaaacaccttctactatggcactagtgactttacctgtctggtgacggaccacgtcgcagccattgactcctagatggagcacggaaagagatacaaatccatgtcatcagccggcaccgatatactgttctgccaatctatgaattgtatgctctttgtcaagatttttgattatgatatgcaactcagcagaaataacggttttgatgtggggtatttatacatatgtacatgcaactcggtgcttttctagaattaattagattgggctagtttcaagagggtataaagggcttgatgtcgctatcgaaagacattttcaatgactggattccttcttggtgacttcagagtaggctgaaggttcaggggaggtatcatcctgctccacagcgtcggtagggggcccgcggtagttgttatagccccagacaccataccagagggcagcgatagcaatgaagccagcgaacaccacagatgcatagttcatgctctccttggtgacagttgtaagcgttggcatgcagaaaagaggaattgcaagaagactccagcctatgatagttgaagcggttagttgaaatccatatataaacagatggttttgttaaagcaactcaccaagagcaataacgttagcgatcaggccaaagactccaaagttgaagctaccgttcttaatatcctctcgaccacggaagatcagggagacggcgatcgggcaggcatagctcatggtcaagaaaatgacaccaacacccgaaaaggcattgtacgcagcagtggagccaaagtagatcacaccgagaagaatttcaacgaccattcccaataataaagaattgaaaggaatgtcaagggtcttgttgacagtgctccaccattttgatccgggaatgccgccgtcgcgggcaaaggcccaagtacagcgagaggtagcggtaacacaaccgacaccacaaatgatgcccagcacaagcagaggaattaacaaacagaatgtaccagctgagttgccaatggcggccttgaagatggcgggggtgggctggcccgaagccagattgaccaggtatgtgagatcgggaagcacgaagcagacggggatcaagaagaggagaccggcgataaagttgataatgatggttccgaccatggcctttgggaccatgatggcgggctcatggacctcctcgcagagactaacagagaccatatatcagcatgtggaacagccgacttggagaattcaaaggtgccaagactcacgagataatcatgccggtcgccgatgtggcgtaggcagcctgcaagagaccaatgaagaacgaccatcccgcgggccacccagcttgactttcaaagtgaccaaaaacccatgcggcattgtgacgcccttgcttggcgacagccaacaggcagacgacaatggcgagtagaccggccatagtccagaaaatagcgaatgtctaaaaatgatgatcatcagtatgattaccccacggggcaaaggggcacgtgcgacacatacctccaaccacggcaaccatttgttgccaaacgccgagatggagtgtgtcaggaaggtaatggccaagaagatcaggaagatatgccaggcctggaaatcatcggtgattccgacgcccggtgatttttcaaagacatccagacaggccacgaggagcagggcagttccaaaattgacagcgagggtaatggtgatgtttcctgcaacgtaggaccagccacagatccacgacgcaacgcgacgacaccacaagggcgacaagacaaaggtttgatagtagacaccacctgcagtcgggtagaccgaagtgatttccgccaatgagatagccacgcagagaatcaagaaagagatgatcacccaaccccagatgacattggccggcccacctgcggcgagtgggtagtatagagtggtcgacaagccatagggcactgaagagagaatgaagcacataaaggtgacttgccaaatcgatcgattgcgagccatctcaggcttgtatcccatatcctccagggtgcgatccgcattggtggtgctcacaccctgttcgacggtcaccccggagggatgactgaatccatcggcagccatagagagaatgaagttattgcgataggtttcggatctgcatacggtgcagattggttacatataatcgggacagtattcgagaatgggaacaagagagaaataagaaatataaaaacaaaaaggcagcaaataaagaaaaaacgaaaaaaaagaaaagcgccactccaacggcaaaacatggaaaaaaaaacccaaaagaaataatatgaccggcatatttaatgcaaggcgaatgaaatccaccccgatccacattgacccacccggctccacccaatccccacccgcatccacaggacacgagcgcgattaactttgagccagtcaatgcgcgtggagggacagggagattgttggcacggccaatcagactgcttctataatccaaaacacgactagtgcggtccttgtttcgaagctttcaagaaggaacaccggggggttgtggtctccgagctgacaaagaccagacggagccctaactaagagtacatacatacctggggctaacgggctggatattctgtcaacatcccctgacctaccaaggtactactccgtagttgtctcacctctaactctatacaaatacggagtccttagtgtggaaccacccgttgacatgatgtcggaggcgctggaggtgccaacttctgccagagccgaaatggtaaggcaaatgagaacctcatgattttaaatattggatgttttcgtatctacaatataggcatcagaggcccagattcagatagcaaccagaatggacgcccgtaataccttctccgtatacagttaaaagatccccctgattctacctgcttcccgatatcagccgtgttcccacaggccatcccgcaagtatagagatagcctcaattaaaagggggcacaggctttcggcgcaaatctttcattggccacggctatcttggctgcaaatttttactcaattcttacggtgtactccgcaggggcaagaagtatggcaattttcaaaattcacaaatcagatggtaacttggaatgctgagagttcaccttctgaaaagtctaggcagaaatcaaagtgcgcgctttctaattcccttccaatgaaaaacaccacagatatggggccgagagaatgtctaacatcatacggggtacgcatatccatagtcgcaacaaacgggtggcactactccgtacagtagttagcgacattgtggatgcctaaggtgtcggacctcggagcttttcaatgctgatattatttccgcatcttcgtgggccttcataacgtgcataacattattcattccacgccttctgaccctgtgtgaagaattccattgaagtcaaccctctggcgcccattcaggtccatggcttgctgccaagcgtgtcatacaccccaaagtactctttccagtgtctcgtctacgtcaaccatcacaatcatacagaggcgacgtatgcaacttgcgagccgtcattattacggcttcccaggattgatgtgttggtcgtgtagtgtgcagagctacctcgactgatacagaccgtacaaagccatatcaaattctatcctgcggtcgctaatttataaaatgcccaggtttagagcacaacccaacttttcaacaattcgactcatttctgcatgcgctaggaatctcgccctaggtgatatggatcttttgctccagtgaaacagatggatgacgacgtcgaactactgggacggtcggatttgtgcgcttcgtgtcggtctcggggcaggtggagacgagtgtgtccatgcttatagccttggatgggcaatcaaatgcagacaataggccttttatacagactgggttgtaaatttcgaacaatagtagatccggactctaaatgtcgaaggtttcgtctcggtccgcggtgggggatgtggggatcttgacatgagggagaaaattgtgggggaagccggggcttgaatttatatacggagtacatggactctctttgcacgacatttaaaatctatcattggattgcgaggataaaagctcgcctgggaatgacaagatatagagcaatcccatctcgcgaagtaaaatacttaccccctataggctctgcatgtgattctccacgtagatcctgatagcgttaacttaaactatattttgtaaatgtatcattgtatagcgatatcgctatatagattcatgctatatcaaaatgacgtcggtttcctaattgagcgccggcgttgaaaaagtcctatctcaaagtcgttcctcctattgtattctatccagcctccaacatcgctttatcaacatttcccaatctcaccatgacaatgaataatatattttcctctattgccacttccaccaaccatctcaaggccaaatatcatggtcatatccaagctaacagattcaaactgctgatacaagagctccaagaagcagaacagaccaaggatcaactcgactggatatctgaacatcgccaggagacaagacgggctaacaatatcatccaacgggaaatgtatgtgggtgcgacatatcgccgctatgaagcccaagtgcaggttgaaaccccgccagaaccttccaccttgaaaaagcttcaggggtgcaatgtcgagctcatgctactgaatattgaatacttccaacacctagagcgaatggcagaactccttgagcgcaagccatcgggatgcctcgtccatcgacatacaaaaaatctgcggcacaaatccaaacagctctggaatatcgaacagatctactgccaacttcgtggcggctgctgcgctcgtgagtgtggttgctgtggacgatcttggcacaccattcgagagccttctggtaaggttcgatatatgcactgtacgggaagttgtggatgttgtacccgccatcgtggttactcttcttcaagtgtggtcaggaagaagtccggcatgtaagcttaacggtcgacaagccccaagggacttcgatttgtgaagggggattgctctcgcataatgcttgcataatttctgcgatatcttccaacataaaccttgaaaggtgccctggcctttgattcgtcaatcttaactttatctcctatttaactttgctcgtccttttctgatacgagattatttaattactctttatctggtctcttgcccggtctcttggcccagcttttttttcttttcttgtcggttattcgcggccaatagtatcgtggactggtcaccggaccgctggtgttgttacttagggcgccattttttgcccgtgttctattagggagttcgagagatcatttttccattctgccgttcacggatcccagcttttgctgtcctctaataatctcaaccatcgaggtctttccggttgattatgcaagtatgggcactaaccgtggaaaagaaaactcggggtataagctgcaataatgaatatgttgtacgcatttcgtatgattttgcagtcttatctccggctggaagtctagtggcttaccccaggattgtacctttgttcaggcctaacggccattaggcggccacggacccctctactgaccagtcattgtccagagatatagcgatttaatacggcgcggctgggggtctctgtacgacgggatggaaatgcgctgtggaaaagactcttaaatacggcatagattcctgtcgagcattttttatccagcattttccgctttcattgctgcacaagatggcaacaatagaaggtgatcaacatccgatcagcgagaagggcaaatcacttcgaactttagtcgaagccgacctgctcgatgatcgttatgtaactacaaccaaacgtgggttgaagaatcgccatgttcagttaatggccctcggcggcacgatcggaacaggtaagtctgcagtgcgacatgaaaaaaaaaggattactcacataagtcaggacttttcgtgggttccggccaagccctggccattggaggccccgcatcgcttctgttgggttatctcttcatctcagccatggtttatggcttggtcacggctattgctgaggtaggtgcctatcttccggtacatggtggaacaatgagttatcatggattccgctatgtgtcgcggagtatgggtttcgctatgggatatctatactggtactctctcggaatcttggtgccgtacgagatcacagctgccggactggttattggatactgggaccagaatggatcaatcaatatcgcggtgtggatcacagtcatgatggtcgttattgtcgcgctcaactttatgcctgtgcgagtatacggcgagtcggagttctggttcgccggggtgaaaatcatcactctgatcggtttgttgatggtatctttcatcctcttctggggtggtggacccagtcgtcagcgactaggctttcattattggaataacccgcgtccattcaacgcctatctcgcaacgggagattcgggccggttcgtggcgttgttgaaatgcacagtatccagcgccattgcgttcattttcgccccagagctgattgtgatcagtgggggtgagatggagtcccctcgacgcaatataccccgggcagccaggagatacatttaccgattgatcttcttttacatctttggtgtactagccattggtgttatatgcccatccgatgctagtcgtttgaccaagagcgacggcacggtaagctcatcaccattcgtgatcggcatccagaacgccggcatccccgttttagaccacatcgtgaacgctgccgtcttgacatccgcctggtccgcaggaaattccttcctgtatatgtcttcgcggtcactctattccttggctatgtcaggcaacgcgccacatgtgttcaagacatgtaaccgatggggtgtcccgtactgggctgtttcggtttcggcatgcttctcagcattggcttatcttgccgttggcaactccagttcgattgtgttcaactggttcgtcaacttcaccaacacttctggtttcatctcatggatctgctgttccgtggtatttctccgtttccgcaaagctgtcaaagcacagggcattgaacagccgtacaaatcaaagatgcagccgtatggggtttattttggcctcgcgggtgccactctgatggcgctcataaatgggttcacagtgttcttcccatcggaatggtctgtgagcaactttttcaccgcatacattggtattcctgctttcctgattctttactttggacaccgggcactgtattggagtgatccatgggcatggcacccagaagaagtcgacatgcacacgggcttggatgaaattattgctgctgagcagccaccaaaaccacgggggccttggtggaagttttggtaacacataataggagctctaggggagagtatgtttgccaggtttgccaggtttgccatgtttgtactgtttgtcaatgtcatgacgtatcaactatccaagcgggtgtactgtggccactcatccgccttatcaccagacgaatatcccataacatccaatagcaattcataactcaacatctttttgctccgtaactcggagttggcccttatcaatatatttctgtacggaaaatagccagtgataccttctttattactcccatcgtcccacctattctctctcgtgttcggtatacgccgtcgaccgtctctctcccacaagttgcctttagtatcagcccaggactataaagactgccgtgtagaacatcatatgaaaattcgatttcgagtcgcgaacctgaaatcttaaagaatcagaactatggctgtgttaccacttaccgtccgtccgcttcagcctcctccgggctcaagcattgattttggtgctgaggttgaaggtgttgatttggaaaacttgactggtttgtggattactgccaattataagagcacaagctaatggtcatatagaagagcagtttgccactattcggaaagccctctacgagcaccaggttgtggtgttcaaaaaccagaaagggctatcacctaaagcccagtatgagctgaccaagcgattcgacccggtttccgaaaactatggacatggcaagaccattgatgcgaagcgaagcatcctccatcctgacctcaagactgtccctcaccagccacaggtgcaggtgatcggaaatggacatgttgattcgtacgagggtctcaaagatatcacattacgacaccctcaccaccgcacattccacaaagatcacatcccggacgataaggactatgattttacccggttttaccgctggcatatcgatgccgccctttacgacctatacccgccccaggtgacaacgcttatggccgtaagtgtgcccaaaggccgccgacagacattattgtatgatgatggaaccggggaaacaatggatgtaccacttgggacaacagcgtttgttagcggagagcggatgtttgaacttctttcgcccgaggataaggagtttgtgaagacaagcaaaattgaatatgccccccatccgtaagatcccttatggtattcccatggctctgatcaactgagctaaatatcacaacaggtacatttggatgagccaagcgcattcccgatctacggggctcggtctacactcagaaggactcgagttgcctgactcggaacttccacctatcgaccctagtaagatcatggttttcccaatgacctggaaaaacccagtgacgggcaaattggctctccagatccatccctctgctgtacggcgtatccactgcgccgatggaaccacgatcgatgacttggcccgtgtacgggacattgtctataagttgcagcggccggccatcagccctcagtatgtatatccccatgactgggaagataacgacttggttttattcaacaaccgtggcgtgctgcattccgtggttggtgcattcaaacccgacgaagtgcgactgttccgtcaatgtaacttggcggcttcggagccaccagttggggcatgagtgctttcatttcgatttcgatttgacatttctgctgttgtttgttaatattggattttcgagggaatcaatcgaacttaatctggcttgaattttttgaactgatataacttaaccgcgggaatcacatcttgagtaatgaaatattatatatcggatgttgtacataaaagacgccatttatgtatctgtaaaaagatctatgagcgtattgacaaggattagcggacaatgtaaaatccatgtacggcaatttggctctctctgagctcatcggtgacagagcgaaccccaacccggtgcaatggaacttgctctaccaacttctgtcctcggttgacgatactagtacaccccccgaccgtgcgatcaatccaattcgaattttgttgaaggtccggatgttccgctgcccacgcgggatgagccagagtatcatgtacaacagatgcgtcgtacacatcagcgagcagggccgcctcggcagctgccacttgcgcctcggcgagttctttgctcgtagttccagtgggtggtgggatttcagcgcgaaggtatcccaaaacacgaatctcgattttgcttgtttggagaggaacgtcctgaaggaggcgaatggcgaccacacgtttcgatatttgagccatatttactctcgtcgcctggaggggatccaatgcccgcacggacaagatagctgggtaccatccagtagtcgagcaacctttgctcgactcaaggtcgaatcgaacccagccgaagaagtaaccccttaactgctccgtcacccagtcgggcattctgattaagcttaacttcggcatattgtcatggttattggggtacgaggtttgatcgggttgacagcgagctttgaatgtcaaaggaaacggtgactgggggccggcatcgatagaaaccgggctgcttccagctatttctggcgctgctagatttacttgagatcgtccaataggacccttggagccattgatgataccacccacgcggttctcaacaccactcatcgtgtaagccttttgggccgctgtcattgtcacccacgatggacgaagcgcagcagcttgggcttgaagcggagcagtttgggcttgaatggctgagacggccggacctgccacggttcgcgctgcagtttgggcgtaaaggctcacaaccatagccccaacctccaagggtagcgtgctcaagctcgcgccacggatagagctaggggcagtggatgcagagagcacccggaacacggggctattgccaagcaccttcttcttgactccttggcagagaactagctggaaatatccatcgcctgcttcggctggaatccgtacaacggccgtctcgcgtagcttatgtgtatcgcgcggacgtggcggggccttctttcgaaatttcttgatgtcgcgttgccaagctcgttcatcatccggagtcacctggtcggccctcagcggcatacccggagtcacatccagccagctatctcggagattgaggaatgacttgaattgcattccggtcttcccggtccaacctttactctgcaaccacaaggtgtgttcgggaggtaaaggggcatcagagaaaattgatatagcgaccgatgtagtgggcccacggtagaagaccagtccatgggaatgtcgcaaaatggtgacatgcttgtttgattccgttggacgattgatcagaccagtgaggaaatacctagcttcgctgtatgccttctgaacaggcgtcggaggagccggagatgaggttggccccgctgtccttggtcgtggcagtgagcctggagttacaggcctggaaggtggcgtcccataaaggtccgtatatgatgggggctgtgatgatgggggtacaagggacggggtactagcagcataagctgtcgcctcccgctgatcggcatgggctgtagctcgcaagttcgggtttgacaggggcttccgcttgatgcgaaatgaatctggcggatggctcgggcttaaatgactagaagacattttctacatgatgttcaaggaattcaagaaattcaagaaatgccgggccctccgatttattggaatcatcactcttggccacttgcccccattggcccgagctggatattggcctgaggcatacattaatgcctgaggttgtaggccgttctcgagaatatgcgaaatatactgtaatcttattgcttttgacctcagctcgtactataaaactaggatgtattgaaggctaatggtatgcacctgcacatgccattgacctcctgcgttgggattgatctaggtgtgtagatacctcgaactagatccggactcgcggtatggcatgcatggatttagattgcttcaattatatgttttcagacatttgacctcttcaatttcaacactgtactatctttcagtatctcctactcccattcgtctctgtcattgatccgttcatctatcctccagcaactttgtagagtgctcaatctcattgtatgagaaacaaatattcatgactttcaccatttccacagctatcattgtcagtttggatccattccaaggctcttaaaactaacacacctgataatctatcaccggctgtatcatcctcatcccgtccatttatccgagtgtagtggaggacaaagttgacccgtggccgacggcccgcttggtacatttcaagtcgcgtggggacatcgtccggcgtactgccacaagggagcaaggtggcaatgctaactgcatcttcgattgccatagctgctccctggcccaagtctatcgagttgtcagtgtatgtcacacaaaacaagtttgtccatttgcagctattcggttgcttacatggctggaacggatgtgctgcatctcccagaagagcagcgtggcctcgagtccaagtcggcagttcctccatatcataaagatcccatactttgagatttttgtctgcacttgcaataatttgctgaacaccgggtgaaaacttcgaaaaggccctcacaattgtagtctggtctccaactgactgccaggctattaatcccaatttgtcagtaaccttctgtatcaacccccggaaacctcttactgtcactttggttgtctgcctgaacttcattcaaagggacaaaagcacaaagattgaggatcttgctatcagagcaagggtaagccacgagccgccggtcatgggatgcccactcaataaacacgccggtgtctcgcacaaaatcaacagtgctcgcatgttgctttaattgatctgtgggaagaagccaacggaagcatgacttgccaacggggtatggggagggagatcctggtgcgatactctggcgaatttgggactatagaacagttagaacagggacgagagctggataaacaccggtgttgataatctagtgttcatacatgtagtccatctgcaccaaggagcaggtcagccttgaaagtgcgaccatcaccgagagtgaccgacggacaagccccttccagattgacctcggttattctacaccctgtatgcaacgttgcggtttcaagggcacgttgtttgaggtggttgtgtagctcaactcgatgcacgaggtaccactcctgtgttcagattagatattgtcctggctgggtccgcttcattcgcctaccgcttgccaatgatgacgagtgtcagcaaactctctcttgtatgtcaactccccgtcaaatctatatcggtgtatctggagaaagcaaaaaatatcaattccagccactcttcttgtcaagagacaaatctgacctgatgaagcaatgtgcctccgaaatctgctggatcaatgcccatccagcgtagcaaagcagtgcaattcggcggcaaatggatcgcagccccagtttctttcaaaaaagcagacttttccagaatctaggcttggtgagaaattaattttgcagcaagcttgggttgttgcccggggcataccacaacacgatgcccctgttttccgagggcaatagctgttgagagaccagcaatgccggcgccgacgacgaggacgtcaagaggctgggctgataccgtcatgatgaggagcctatgtggtttttgagctatatcgactgatttcccttcatgaatctctgacgtgagatttatagcggtatgctctctcatccggtttccgagtttggcaatccccgatacttatctccgagtcagccaagagaagtggatgcttcaatgctgctagatggtccttgcaacctcggatagcacagcggtatttttgagctgaaacggaaggaagctatcgggcgcacagaaattgttgaatactgttgggtcgaagtgatcgacactgcattgttggacacattttccacgttcacctccccttcactccccttcaccatatccactccagtttgaattaatatggcgttgacacatgaaaacggtcctttgaattggagtcttataataccgtgtaatatccatatttccgataataactgttgtgccgctgtcatttcaggtagtgtgcgtggtagccaagacctttcacttcgttagccaatgagaatacaactgttgtgcatttcgcgtcagatctatccgggcaattggcgcgtcattaaatcaattgccctatggggagattgctagtcgtgaacaatataatattgcttaggctaattgtttatgggacgaggcagacagggcaggagggaagaagaaggtgaaacgtgttgatatgccaggagttcgtcatgtctacgagagcaagccctgtaggtatgtacgtgagaaaaatatatatatatatatatgattttagattgaatttcatatcctcattcagagctttcttggctgcccgttgcccacttggttggtgatgttgtagtcaccatagcaagcttcctggtacatggcctccttgttgaggtcgggaatagctctaaggaaatttttgaccttgcaaaatccattcacagagccatcacagaccttgagaccatcaagcggcagaggtgcattattcagcacaaatcggatatactcggtggtatcagacttggacgacaggtcagggttcttgtatttttgcacctgaagatccttgaatgcgaaatcattggggcaggtccaaacttcagagaacaagcgagcgccaaagggtgtcatctggtttaggttgaaggtgcggtgcggggcgtgcgcaaccgagacaggcaagccatgaggaccgtacttgaaataatccagacccaaagcagtcaggacagacacgatgatatcatcgtgggacatgtccatgtatagtggctgatcgagcgggaaagtcttgatgttgtcatcgtacgtgtagttgatgctgctgtcactgctcgtgatgagcctagactgcagacgcgctgccagctcctgaacatagccaatgccctgggcgcggccactgggggacccaaaaccgtagtcgccgtagaattgaagatcgatgtagtattcaaagtcgcgccactcctgctcagtgaagagcgcgcagaaagaggactggcccagtgccgcatactcgtacgggcacatattaagcatcgctagaatgtcgaaagtgtcgagcttcagatcctggggaaggtgtgcagcaagacgctctcgggcatgtttgacaagagacgaagcgaatacctgcgcagcgttgtcacccggctccatgccattcgggcaggaatcggtcgacgatagggtattgttgaagtcttcgagctcggggataatagtcagattgtactccgagtatgagctgttggctcctgtgtttccaaaaaagccacccagccaccagcgagcactctccaaaattcgggggtacgaggtcgtgcggaaagtcggctttgggcgcgcggtaccattgggatacacattcagtgatgcattccaggctgcattggcattttctgcgcgatagagcaatcggccatactgactccagaattgagcgccggaagtggcttcggtggcggcgccagtgggtagcagagtgttcaaaccaagcatatactcccaatcgttcaaaaaagacagaggtccggaaccgattttcttgtgtggatttttcttagtgtagttggccagtttctgggcaaagttctccatgccttctccatcgaggggccattgtgtaggataccgctgggcatggcggtgtagcacatgcacctgcgacagttcacactccgatggaaaccccttagagacattgaaactggatgcatcggcataggggctgaggttggcccagcttgttttcatatcaaaccctgacgggtatgagagaccggtgggactggctacggccgtggagctcgatgccactgcagcagtgcttaccgcaagagctagcagggccatggcagatgattgtagagccgccattttgatgctattgtcgtctctgggcacgcgacaaacttccaaaaacaattcgaggaatggccgacttacccatttttatctgcccctgtggagaggggaaaaggggatcgaccaaatctctttccttgcgtggaatcgcgtaagtccgttctgtccggcacgatgtgaccctagaatcctcataatgttgtattttgctcagggacaagataaacatccttgagttgcggtgatccccgaaatttcaatagccaagctcgcgtggggaaatgcttggcccgacgaagtccgtcaaaagccgtcaagggcaaaaaacaaaggagaaatacgagactttcaagggctgggggatgagccaacgggttgtggccattaaatgggcttttcttgcattcgtataaacccggtgatgcatcagaggcaatcaaagagaaggcaaaagaaggggggaacacatcacatctgggcacatgacctctcccagccctttaccaacacctccgctttgctgctataagaattcagctctcgggtcatgggctatacgatatcccgaaacccccattcgcttaccttgtaccaattgggatcaatgcagatgccatgtcgatgcagctgctcgtatcggacacgagaccacacttcttagagcctgcgcctcaactggatcggaagctccaaataaattgtttctgattacgagctctatcatgaacatgtgggagaaaccataaagcgcaagggatccggccctttcgagcagtttttttctttattttgatactcctaatgcagagacctccaaattagctatatcctagctattattgacttcactatgttggccctcggtattgtcttgtatgccctattgagtacgtccttggcctttgctatcgtcaagctagccctattggctttcattgctgccgtatattctggctagcatgctttgctgacctcgccagcctccttggtggtgctactattacaagctcctactacaataccgtcattgcctttggcgtgctactttggtaggttcctcggatagtctccagacaatacacacgcagtacaaagaaccgacctgacgcttacctcatatataggctgctatttattgccctagttatatttaccagtcttgccatgtgtggtgttttggtgtctgattgggctgggtaccagtctcccaggaaggagaagggagttggtatgaaccaaactagggctggccctgctcacgaagtgccgacgagtatgagtcctgtggttccatagaagttgtgttgtcgtgatgctaaaggtctttatgaacagccgaacagtcaatggcttagcccttcatcgccctcgcccacagcgtggaactgagtaccacacaggtccgcatgaaaccagtccagcataatcaccacagttttggtttggtaggattcgcaaggaatagtaatgggtctcatcggtaataggttatatcttttgcgtgtttccgacattctcatatcacctacactactaataatacgttatgccatgttaatatttgcttcaatgtgattatcaagagcatttatgttcatacaatccgcataaaaccgctgccgtgctgtcacgactaatcaaaggaggtatatagtccaatctatccgtctgaacaaactgtgcgtcgcaagccgtaagtgtccagtcgctgtaaaaagcataatcgtcaagcccgagaaaaggtgagaaggtaaaaagcaaacccaacatgtatgtccaggatataatgagccggctatcaagaaagacaagaccaggtacgagatggtactcaaccaaaaaaaagaaaagaagaatgataatggtaatgacgaaatcaaagagtggtctcttccacaggctcttttccaccgtgggtctcctcatggtcgtgcttgaacttcttctttttcttgtccttgtccttctcatccttgccctttttgctcatagcttcggccataagctgctcgaaggccatgtaatcgccttcttcctcggggtcgcgtgcggcctaaagctagctgttagcatgatactcaatatgcggaaaacaggtgtatatacctttgcgtatatattgccggcaattaccagcgcatgcgcacgctcaatccgtttctcaagtcgggtccgcttatcgcttagaatctgatcacaaacatcacgcaggacactctggatctcaaatttgctgccacgccacgccgctgcgaggatcttgccagtcactctcttctcgtattcagccttcttctcgtcagtccagtcttcaccaccgcgttcctccatcttagccatctcctccatggtcatctgcgcatcaatggctgtggagatggtggtccatgtctccttcgcaagagtgcccttgtccttcaagcgagagaagaagccagagatacctaggaacttctgtgacttgaggaaggaagtacccttctgaatgtatgtttgaccaacagcgtggagaatttccaaaccgaaagattccatttttaagttctccacctcaagtcggatcttctcctcgaaagcatgggacacgtccttacccttgtccgtctcagtccaaacgcttaaacgatcaatcagcttatttgcgagtgtgttgacacgatcttcgcgagcctttctgcgctcatcctcgaaagcgttaaggcgttcctgctgctccttagacaaacccttcttcttctccttcttgcgcagctccttctcctcctgagacagaccggctgcctccatgcgagcttcttcttcggatttgtccatgagggcttgctgtccgaaatttcgtcgaggagtgctggtaccagagccttggttggagactggcttttcagaggggccggcagctgcagctgcaggtgcggcctctgccgtagaaccgtgggtttcatgaacaggaacatgagcgggatcgccagctgcagccttcacctccgcgtcatgaatgttcagtttctcttcagcagattgagccagttcttcctcctccatttcctgcatcgtgatgtccatagtcgcggtgaggtccttcataagggagatctcgccgataagatcaacaaaggcctcgcccccgaagatcatactgaagaattcggacgggtcctctgtggaagacaaatcagaaacggtgtgctggacattggtatgcatgtgatggacttaccgaaaccaccaccaggtaccgactcctccttaccaaacttgtcatatcgctttcgaagatcttcgttgctcagaacttggtacgcctcaccgatctaaattaggaagatatcagttccgcgtaacatgcatcatccctaggcttgcgcaatcataccgcctggaagcgttcgtgtgcggtttcatctccagggttcttgtctgcgataatggattagaaagcctagcaaggaaatacaaggtcacatgcggccatacccgggtgagtgacaatagccagcttccggtaggcctttttgatttccagttcggtggccgtcggtggcacacctagggcgtcgtagtaagcagtatcggcaaccatcgcagcgaccgagcctaacttgagaacagattgaattgatggaaaatgaaagctcaatagattcaaagatctgaaggaaaaaaaaaacagtggaggggtgttgtttaggcagaacctcgagatatttttcggaagttggcgctgatatcatgtggggttgtatgcatggtttgctccggtcacgtgtcggctaaactctgcatttaatctgttctggccttttccccttttcctccccccaatccgccgttcccccaggttctgttgtttttgtttgtttgtttttattaatcctcgtcttcaatacctttgctttcggatcctattccaattgcttcacttggtgaagattcagctactttgcaacaactcttgaacatccgactcgcgcgcctctcccccgcccatcatgggtctcatcggcaatgctctctactactctttccaccccatgcagctgaggtcaattctccaatggtatgtttaggtgttcctgaagctcattcccacatgcgaagctaacgatccacgtcacataggaaagtctggcacaacccgccccatgagcgtaacgagaagaacgagaccgagaatcagaagatctgtttccagtttttggacaaaaccagccgcagcttcagcgccgtgatcaaggagttacatcccgaattgttaatccctatctgcatcttctacttggtcctccgtggactggataccatcgaggatgacacttccattccattggccaccaaggaacctcttctccgggactttaaggacatcttgacgcaagatggctggacttttactgggaatcggccggaggagaaggaccgtgagctgctggttcagttcaaccacgtcgtcaccgagttcatgaacatgaagcctgaataccaggttatcatcaaggacatcactgagaagatgggtaatggcatggctgactatgctgtgaaggcagagcatgacgatgctagtgtgaagactaaggaggagtatgatctatactgctactacgtcgctggattggttggcgagggcctcactcgcctcttcgtcgaggccgggtttggtaacccggctctgttgaagcgacctaagttacataagtcaatgggtcttttcctccagaagactaatatcatccgcgatatccgagaggatttcgatgataaccgacgtttctggcctcaggaaatttggtccaagcatgtcgacaactttgaagatctcttcaagccagagcaccttgatgcagctcttaactgcagctcggagatggtcctgaacgcgttggagcatgctgaggagtgcctgttctacttggccggtatgcgagagcagagtgttttcaacttctgtgcaatcccgcagtctatggccatcgccacaatggagttgtgtttccgcaaccccgatatcttccagcgcaacattaaaatcaccaagggagacgcatgtgaactcatgcataagtcaacccaaaacttgtcggttctgtgcgacaccttccgccaatatacgcgcaagattcacaagaagaataccccccgggatcccaacttcctgaagatcagcattgtctgcggacagattgagaagttcattgagaccatcttcccgacgcaatccgccgaggccgctaaccgtaaggtctctggtgagctcactgcggccgagctacagaagaagaaggaagacgacgagaacaagagtgatgtctacttcatgatggctctcatgggagtcattgttgtcgttatcgctagtctcatgatcttcgccgcctggatgatgggcgcccggttcgaccttgcctttaaggagatcacgtctggccacttcaggccgccggctaagaaccagcttgaacacccggagctttgattgtcttatattattttcacatccacggcgttacgaccttttactgtctaatattttcgattcccccttcggcatattgtcttactattttctcgcctgcccccggcgccctcgatgtgtattgataataacataactctttcttttctttgcctcgcgcacacacagactaaccctcccatttctaccccaccctttttagcacggatgtcaaattgcgatctggccttttcatggccgaggttgtgccgaagaagtacttatatcgaaatggagattcatctccctagccagtgagtactagatctttgtccaacggttcgcccgaggtggcaaacatccattgaagatctagaatatcccgtgtatgtaaagttgtatgtctataggaaatgaaaccatcagcctctggaggttgactcttgtcctgaactcagataactgaaaaccggcgggactagagaacaggcccccaatcagaagtttctgctatagtgtatatcttttatttctcggcaataaatttcttccaactgccggcccatttcttttcgctttctcgctcattactcttgccatctatccatcggccaggttggcctccccgaagcatcctcaatcaaatgggttccaaaaggatggcttcttcttctggggactccggcgactccccactgtccgcgagtgatttccggacttataatcgtatgtcggagcaaatggaaggatttgtaagcttaccatcacacctgggcacctgggcacattagtataccttgagcactaactctcatgcagcatagtcatttccgtttgacatggaaccagctttgggaggcctgtgaaaactctagaaaacgggggctttcagcccgccagatgattatgatgggccttcaattctgttcgcaattggatttccatcattccatcgaagagcaacacatcttccccgtattggcgaaaaagatgcctgagtttcgaaaggagcttgagctattgagtcagcatagacagatccatgcaggactcgagaaactcgagaagtatcttgagcagtgtcggtccggcgaggaagatatgcgtcgcgaagaggtgaaacggttgatggaagggtttggcaaggttctgtggacacacttggaccaagaggttcaaactcttggagctgctaatatgcgcaagttctggtctcttgctgaaatgcgccagcttcctatgtgataataacgaacggaggcaagttttgtcaatttcattttcagaaacatgtccaactttttttgaagagtatacatatctgtgtgcccatttgaattaattcgaactattctggtttgctatttggtcttgaaaaagcacctatgttttgtttccgagggatctgcttctgcttcatcaatgtccatcacaagccagagttgcagtttgataatggtaacccctacacgaaaatccttggcttagagtcgagtgaccactgctaacaatgtggactgttcccggaagctccaccacagcgtacttgggaatgtgaacacgttgtcatcccttgcctggtatgtatactaaccgcatccaggtagcattgcaagcacgcccccaacttctgctgtttcaaaaacccttgacactcgacccagtttgtgtatgtttctttcttctgttggcgatgatgtcgtgcgaaacaagcactctcagttttaccgattcatcggtagatgtagcgagaatgccagggtcatatggaacccataaatacggagcagccgcaaagcttcggaatatcgacactacatataataaaatatacattgttaaccttcaatgacatgtgcgtcacttcaagttgatcaatctcgtggcagatatcggggccgccgatcttcatctgatccgtcagcgctcggctgtcagatgtttctgtctccaagaatgtgctctcacagaagtgcacaagctcggccgagctgctcattttcactaggtctcacatcatgacgataacggaaaggaaatcttggcttggatcatgaacaatcggcgggaaacagagaagatcaacacatccgcagcaaatgcaggtcatgaacctattaatcgacgtggctgagatccccagaaataacctgacctttttcactctccatatctccactccagtgggtccataattgtatctcatcttgtgtctggggtcatcagtactacaccacgcgctcctttcctcatgcggattgggcatgatgtcgtgccgcatgcaacttatatgaaatacaggatataagtaccatcggaccaagctcgagaaatattaggttagtcaggttatagcttcgcccttgctatctataccgtgtcaaaatccgctcaactcactgccgtttccaccaacatgaagttcacaaccaccacgatcctaaccaccgctatactagcaggcagctctctcgcagcccctcgcagcggcctggttgaccgcttgcagacccgtggtgctctgtcacgccagtcactacctgccgaaaagaagggtgtattactgagggaaggaaccgagggagtcaatgttcaatacagcaagaactgggctggggtggtgcgcgagaagccacccgccagtgctacctacaccgctgtgtctgcaactttcaccgtccccgagccaacggccaccgatggctctggggatatgcaggctgtgtccgcctgggtcggtattgatggggacacttacaccaaggccattctacagactggcattgatgcctacatccagaatggcaagaagacatttgacgcctggtacgagtggtatccattaagtgcggagaactttgaccttgcattatccgcaggcgacgttatcgttgcgaaggtcgagacagattcgcccagcaagggtgtcgctatcatcgagaataagtcaagcggccagagtgttaccaagactctgtctgcaccttcaacctccgccactctcgctggccagaatgccgaatggatagtcgaggacttcaacactggtagcagcatggttccattggtcaacttcggcagaatcgattttaccggcgcccaagctgaggctggcggtacgaagtatggtgtcaaaaatactgctgttttggatatccagcagaatggcaacgtgaaggcccacgtggaagtccgaagtgacactgagttctctgttacctaccggtgatttgatatatatatcggagttgatgagtctggcgttttgtacaatggatgatatccgtcatatatctctcaatcgagataaggaggaatttgcatcagcaaagtgaggtatacttctttcattcaatttagtgaaatctatcaaaagaaaacaatgattgatcacgtcatttatttcttcctgtgataattggtcaaaatatccctgcccggatcctgatgaccctttattatcttttctttataaaccgcgtattcagacatgttgggcctataattagatgaagagtgcgcagaagatgttacgaagaggaaagataatagacttcttactaactattcaggaaccttagaaatacacatagcatcacaaagaaaaggacatattttggatgttgaacaagaaattcgctgggatgacagaaacgacgacggggtattctgctgaatgataagaggaaaggacaacaatcagatcgaaacgctcagaaaagataaaggcaaactgtgagcctagtaagggctcgaggtgtcggcaagaaggctgtacgagtttaattgaatacccagagggcgaggttgaggcatcaaggcgcctagcatctgctggtcatcgtactcattgcctgttccatctgtaagcgcgaagaacatggcagatggtcggttcacgcgcaaagcttccaggatgtcgtcactccacaggcctgtgcactcgttattgacaagttcgaaatacggattcagaggcggacagcttgagtcgaggttgatgaaacggatgcgcaaatactccagggcagggaggacggataggcactcgattgccttgaccaccattgcctcaaaatcacgaatgaacgcaatgctggtaattggacgtgtcccgtagctcgtctgcgtccagtgattcaatccgtctaccttctgattgtgacagcacgtcttgactgaaagatctagtgacctgagaggagaaccagactccatttccgttgccccttccttcaatttcttgaagaggtaccaacatacacgaccagagtaggtaaatgactcgaagcgcggaattgcctcgccaagtagagtacagatcggaggaggcgcgctttgagagcggaaaagcgcagacagcaacctattactggcgttggaaaattcctccaggccaagattgatgtgtcggatggtaggtggagtatcgataaagatgctcatcatgatcaagtaggcacacagatggggttggacccaatcacaatgccattcactcaaagctggcaacgcttgtgaaatgttgccccagtcgtcaacttgtcgcatcaggttccaggcaccacgcatgatgagtgtctgtatttgtccaagaacaggtagattccgaccgttcatggcttccctatagcgggaatgccgcactataggcgcattcttgcagtggccaccctccagggtgagaacccgggcagtggggaaaaggtactgaataagccagaagatttcctccagcgaagtgttaccggttgcacggtgataacgaaaaataacatctccgtggttatgatcatgattcgtctgcatatctacaacatgttctgttgcatgggtgccattttgctctgcatttgagcgagcatcgttagggcgaacggcccgatttccccagataggcatccaaatctcaatgtgacagacatatggagccaaatgggggtttcgcttgaaccaccatacacacttgatcaattcgcggttggtgcctttgattttgactagataaaggctactcattagtacaattgcgttgaacttcagattgacagtcagataaaactcactatggcggtagattcgactttgaacaagtccagtccacatccggcaagtcagggccaggtcggaaagggccttccgccgcggatggtggagagccttactccagttctgagcagaagattgaccatgtgctgaatggttactaagggaggctcttttgccaaagatttgatccagaatgacctcatggatctcaactgggagctctgtgaattggattgccgactgtcctgccaggggatgagattggtcctcactggcggcgatatgggaggtaagggtttggtagtcatcctgaccaataatatttgcactgatgctgcagtttggtttctctgcgctttcaggaactgcaacaggtgcactggctaggggactgaccgaccccggccggagagaaattgcggagatcatgagggggggtagagatgaggatgaaagaggattggaagagtcagaggccattgatgcgacctggtcttctttagatcagaggctgcagcctgatagctgcaatttgatatgtgttagtgaacaaacgagccatgccggggatatgcatatagatcgtactcacctcacagctgtggttaaccgctatcaaagccgctccggctcaattcagtttaggtacagacgggttatctcagaggatcctgttcacaaatgaatgaaataaacgtcagaaagagagagggtcgctggccgatcaggctgttgggcagcttgatgaggaggattggaaggggattggcggggaagagataggcccggctgaaagtgaagagacgtgaagatgaaagaagaccgagaacacagtgaaggagaaaagaaaagcaaaatacatagtcagaggaaaaaagtgacgggggagtcagaataaacgcgggagacgttgcgcgacacgaagttctacggttggaatacttgatatcggggcttttgagaaccaagacaagggttgtgatcaataaaataacacgaacataatcaaaatagatcgaagcctgcattatacatgtatttattgggtaacaactatatcatgtcgtagatggtgtacatgggccgtgatagttcccttggccctatagatgccgtcgttttcgcaataagaaacatgacaggaataacagtcattgcgattgaaatcggacattatttccttgcagacatacataacacagatcagcaaatggatgcgagggtatcgatgcagagtagacgctacaaaaccattgcaaagtgagaaagaaaaaaagatggaagctagcgcttacgcctgaaacggaaacgaagttcatcatcgctgtccgaatcgcgctcctcgcgagccctcttcgggggccgagccggagttgggtccgaggtcggttgaagcgaggtgcgtgtaatcgctgacagcttggaccgtgatggagcaacttcatcgtgatgatcagattcaggacctccagcctcgttctgagggtaagtctcagcaggattgccaccccaatagtgatcgccaattccatagtctttgcgggtcacttcttctaaggggacgatcactgtctggatgcgagctcgactacgcggctcgccttttcgccggaacttcttgaaattcttgcgcccattccattgatcatcccatctgtccgaactgtcatgctcgtgcgctggtgcgttccggacgggaatctccatttcttccacaatagccaggttcttcaatttgtccacatccacatcacctacatcggctgaatgtgagtcttcttcggccttgcgttgttgttcttcttcttcacggtgctttcgcgcggcttcgagcacgtcaagtttaggtcgcttgcgtttcggggcctccgattcgggggctacggcctcatcctctgggtgatggcgagtcatatctgcacgacgacgcttcattgcacgggcgcccgggagaagatcagccaccatgtcctcctcagcctcttcctttactatattcaggggctggatttcttgagatggcgcttgagtttcgatatcgatggtttgagtggagttgatattggtgtcctcttcttcaggtgcatacactgggacagattccatgtcgaatccgtcatcgaaggttttcattttactgacgtatgcacgcacacgggtcttggccggagctttcgagggttgactaggctcagagttaggcagatctaccgattcaggtacggcagaaactgcttgttggcttgtttgttcagcctcgaccgcgggtgtagatgcggtgatctgactagagctctcctccgtgggcaaggtacggcagaggggtgatgcatcatttccaaggatagcgtcaaggaactctcgttgctctatcacgcgctggtccatcattagagcaacctcattaccgacgtcaatagaccattgttcgaggtctcctttcgatcgaaagcgaacaagaacgacgccaccggaaccgtgtcgctcggggcccacgcctttctgtcctgctgccttttttataaaccgaacaatatctgcggcagttgtgaccccatcttcaatttcgtagaggagcgccttcccttggccattgttgattggaccttgtaggttttcaaactggcttggatcaccgaaaataaacgtatatccctcaaagacattaatacgtgcgggattgggagcgaaagcagcggcgggacgctgggttggttctttcccggggggcggaaggtgttgatttggatcgggccatgctaattcgaagtcggtttcaagtggacatagcgactcaatgttctcaagatccccgggggtagccgcgtagacgagtgcatcgatatatgaatcatctactatgtacttcccgttgacgagtgcctgaagacccttagctgtattccgtttgcgctgtaccacatgtgttgtgtgatcgacaatataatccatgatggtcttaatgtcgaggtcttctagacgtgagcgaacatgggctagaggatcttcacctcgcacctgcttggaggaggatgacaaggtcagaaccacgggctcccatttgatcctatcaagagcatcagccgggattcaagccaatcgtaagaagacatacgcaccggagcgcatgctggtatttagcgagctggatgagatgctcatcgctcttctccaacttgcattctccttggattctcctctcgtcaacgactgttcctttcttcgagtctaaatcggttatggtgatattggatcgcgctcgtagtgacaactggaggggtattagccagataatgcatatcgtcgcggggagttcaaccgtaccccatctcgcggactgaccggtgagatttcaatggtcatatgcttgcgggatatcgaattatgattgacagcatggcggactattcaataagagatcagccgaactgtgtgatgctccaactgaagtaggccatacctccgtctcgatggaatcgaccgaatagatacctctttccagggcgcagccacacgcgcttccctatgaggctttagcaaccaatcgatccttgtcaatcaaatattcccaccttccagaaaatcaccggtcgaatcaagaatccacatgacgacgaatccgcccagagagatgtttagcgttaggcaacatggctgaggctcacgcaaattggaacgcgtgtccacgtgactccgcgtcaaattgaattccgcgctctcgccttctcatgatcatctaccagccatcgatgggacggtggaaagtatggagtcttcaggtgagaaccccgccagtgatccgaagcctgagtcggtccctgatgaggattttgggaccctgaaatatcagctactcggtccctctttaactaaagcgggccaagattccgtcgatcagcaaaaggtgcgcttgatgattgtattcattttgagctttagctaaactcgcgtttccaggtatcagaaattatatacaatgcctccaggggctctaagttctttaagcacgaacaggatcgggatcggaatctaacgttgaaaatcgagcgaattctaaaagaaaaggcacggctagaacgtctagacttgagcagtgagctacgacgtgccgatgaatacctcgcggagcttgaatcgagccgtgagctctctcaacatgtcattcacgtggattgtgacgcgttctttgccgccgtcgaggagcttgaccggcccgaattcaagacagtgcctatggcagtcggtaaaggagtgctgacaacctgtaattatctggcgaggaagtttggcgtcagaagtggtatggcctcatttgtcgcgaaaaagctctgcccgcagctggttcttttgccgccgaactacgacaaatataccgcaaaggccaaggaagtccgagctatcatggccgagtatgaccctctcttcgagagtgcgagtatagacgaagcctatttgaatatcacagcatactgcgacgaaaatcacttggagcctgatgaggttgttcaacggatgcgcgcagagatattggaaacaaccaaggtgtctgtttccgccggaattgctgctaatgcgaagattgcaaagattgcatccaacctcaacaagcccaatggacaatttcaagtccccaatgaacgggaggcaattatgaaattcatgcgtgacctgtcggtccgcaaagtgaatggaattggccgagtatttgagcgagagctggaatcaataggcgtcaaaaagtgtggtgatatctacccacatcgtgctttattgaccaagctatttggggagaaggctttccaattcctggctcagtgctacctcggtcttgggcggaccaaaattgaacctgtcgagacccacgaacgtaaaagcgtcagtacagagaccactttccatgaaattggagacaaggaggaacttcgagcgaagctctggtgggctgcgcaggagcttgaaaaggatatggcccggactcatttcaaaggccgcacgcttgccctgaaagtcaaactgcatactttcgaagtgctgacgcgccagacagctccatctcgtgccgtcttcctggcaaaagatttgtactcctttgctttgcccatgctcgccaagcttgagaaggatattccgaacataaagctacggcttctcggccttcgctgctcgaatctggtcagcactcagaaagttggaatcaactttttcggcgtagcaacacaaccaaaacccgccaccgagccaacttctgagcccgcccctatatcgacatcggatgtcaatgtatatcatgagatttgtgccgaggaggctttcgaggcggcggctcgccaggaaatacaggacgagatgaatgatctagagcagctgagtcaagagacacccgatgttcatgagccagaggcctctgcagccccaccggtggttgaaacacccgcgatgtgggattgtcctgtatgtacacgaccgcagattgcggatgaccgcgcattcaacgagcatgtggacttctgtctctctagacagacaatccgcgaagtcgtgcaggacacatcagaagaaacatcctcaataccccccaattccagaaaaaggaagttgccatcacaggctggtattcccgaaatggatccaaaacagaagcggctttttttccaatgacggcgaaacttggatgccgctcatcccgacagaaaagcgccgatactcaggctcggaatccagcaatcatttaatattgcagggtcaccgtttttcaaggctccacttgacagccgccagattcgggatagatgtgggacgtctaggggcgagacggatacagggggttcttttttctatgggtgtgttggcaatgacctgccaatcaagggccttgtagaacccattctcacaaaacaatagaggtctcacaatttcctcatcgcaatgtcaatagttcgacgcccttgttcattgaagtaaggaattccacgttgcggtgaagcggcgccctaaacccaatcaggtgacattgttttcgtcactcgactttctcctcgactttctcgactttcccatccatcaggccacaaattccctgttacggaacaagaagacaggcgattctttttattggccggtgccacaatgctcatgtcctgtggcacctcgcaatgccatgacttgcaccccccgcaactatgacctacgataaacaaaacaatggcagtatcgccaaaccgttcacacccaccctcagcgctgcattccataggagtaacagggctcctttgacaccaaaacttgcaagtccaagtcccggtccaggattcccacgtcgcctcgcacaacccgaccacccctattccaaagacgactcccccgcggtcccgacctttctgagcgccaacgtcactccacgatccggtcctcgaaccacccggcgagatggcgctatctactcccccacaaatacttcacctgccccttctccctctccaaatccaccttactcccagtcaacaattggttatggtcgtcgagaccgcagcccggcccgcggggtcaagccggaacaatctcgaactctgaggtcgaagacattgaccgcagacaaccagcctagatcaagattgaattctttctcggatacgacatccgggacccccctgttcttccatgcgtccgacgcacgatcgtcacatccttctgagccatcagatgcccctcgcccgaggccccaggggaagacatccccagcctcgagcttcatatatgcgaacggagatcaagagcgaaaatcactaggggagcaatcgaatgttacatccgcttctgccaaacggcgatcgggtggtcttccccgtcccctgtccgccagcaaaccaccaccttcctcctcgcgcttgagctctcctggtcttccagatgtagcttcacaccctccagaagatatcagattaccatatgtcaccagcattgagagtggactaggaattagcccgcgtcttggctcgccctcgtcgagtacaatcggcgagagaccgcgaccgcatccgatccgacataccaagtcctcaagcgtcgactcaggccgccatggcaattatttacaagacagcttgcgggcaagcccagtcatcgtatccgggagccattttggtgaagaaccagcgcctgtgatgtcggagcagatacccgcccttcgccctcgcatcttcagcaatgtatccaccacctcaacagatacataccctcctgtaccacttagtcctgggaaatccgagggtccgagtgaggcagctcttaatgcgcgtatcgagcgcaagatcatggacttggaaataagcaactcttcactactagccatcaatcgtaccctggagcgcgaaattcgacaacagaaggcggagcttcggcggttccgacgactgagtcgctccggacgcatatcaatggcaccttccacccgttcattctccggagcggcactctcagttaccagtgagctaaacgagggcgcaagtgagatttcgaacctgtcacaagacgatatgtccgacatcagcgatgaggattcaattgtggatgagagcatcctgagtccgggctcgctggccgagcataatgccaagaaccgtgtcaatgatgagaaacgcgtcatgcttgacttggcgcgacatcaggaggtgctagtggacagccagaagatgaaccaaagtctcaagcgctgtctaggatggaccgaagaacttatcaaagaaggacagcgggccctggagtacaatgttcacgttcaagacgttgagctgggtggccgagtcctagcgcctgaagagttgggcgaaattggtgagagcggccgtggtcttttgagcccttcagtccaatataacgcctctttttctcctatggaggcctccgaactatcatttactgaatcactatatattggaacactatctcctacgccctctatttctgatccgagcacctgatcttatttttggcccttgtctcccggcgggacgattcaattgttttctttcttcctcatacatttgcacaataccctttcttttttgatgcgtttcattttgaattcgtcctttcttcgatcgagacagatattatctcactgttttggacttagcgacttgtactatgagactctggacttacctttcttcccttgcgttcacgatttccatcagacaggatggtcaatgatagacctctatacccgatcatttcatccatcgcgaacacattttttggctatttcgaaagatacccgatgtgcaattattgtcttgtgtttatgttctgtctccatgtgcactaattgatctgcacgcttgaaaatgctagacttctgaccatgttcgcttaatgctgtgttcttcaatatctcatgtcttgattttctagaaaagaacgaccagtcactatggttactctcacagtctgcaactttgaaaatatcattatatcatggtcaacatcatcaagagtctcatatcatggaaatggacactgtcccatccgctgccgacgaagagtctccttgaaaccctccaattccctgtaccccttgccctcaaaatacttcggtcccagatcatcggtgcgatagccctgtgggtaatatttgtccccgtcatcaccaggcaaaggatgtccaagtgcccatttaaaccatgccatcggcccccagcggttccagattgtgggctgcacatagaatggagctccgtcgtatatcaacacccagttgcggccgtgcttattcggtttgtcggtgaaagcgttcaagcgcaagaagtctgggcgtggcagtgataggtatcgcaggtatagttggcggagtttgaatatcaacgcaagtatgccgctgaaaaatgcaggtggttcttccatcctagaaaatgtacacattagactcgctgaatgtggtggtgagttgggatacatacatcatcgcggtccgcaatcgatctcccatcagatatgacacgaagtatctagccaacggcttcaagaaatttggcaagttatataccagcacgtcaatcgtcttttccgcaagctccttgttgcgggggtgtggcttcatgtgctggatttcgtattgctggctccatgcaccaatctcccccagccagtgaatcccatcttggaagccagtctttccagagggcaaagcatcataattgatttccaacgcatcaccgaggctcttccagaatgtcccgacagcacatcgttccatttcagtcatctcgcgccactcgaattgtttcacaaactggattggctcgagagcgaataagctcagtgtgtataacatgtcagcttccatgatcttgccgctagctctgtagcccttgtgcagaaatttggttcgggctattgctgtccgcgctcgctcggagcgtgggtcgaaagtcatgaattcgccgatcagtgtgcctgtgtcggcatatcttttgaatgatattgtagagtctgataactgtgatgtcttcaggagcagtgtggatattgtcggaatgccatatgtctgcccatgtcaacttccagtcatatacatacttggatgggctttgcatacgcggaagagggcaaactgcagtgacttaagcacaataaagggaaactcggtctgcatgattgtcttttgaataacccaggcatcctgatcggacatgctgcgcatggattgcctcgttccgtagcagctatatttactgtggagtgtctgccgtcgttggaaacggagtgaagatatcagcgctaggtatgttgctagccccagcaacatacatagtgtctgcttagacagtgaagcttgtagcaaggagctagatggagggacatcctcggtactggacgtaggtaatgatgccatttataacaaggcgacggaaatcactctgtagatatagatttaggtcttgagatagaaataatgtctattaagatcaattaattgcactcggtcttatatagattccatcctctatgaacatataaccttgatgacgattaatcgtgaagtatattgctgatctcatgttaagacgaccggaccgaggaagataggctgcggggaaatctcacatctcaaatgcataaatttttgtatatgggtgtacatcatgggatattgtgctaaatagaaatacctatgagctgtattcaactgtacaagagagccgtgtagtttcaatataccgaggtttgcaattaaacccgaatcattcgaccatccacgccctctgtgccagtccaatcaaatcttcatgaatcagcctgatcgacaacatactcggtatctcagtcggatggacttgagccagcatcgtacgatatatctatcccttgtctcccctcttttctcgctttgtactcgtgcttttttactgaggggctgccaatttctccgcctcgaaacacaaagcgtccttggttgcccacttccttggaaccctgcttgtctttaagagggtatgatcttcttctttagataatcggggaatgcgagaaatcacaggaccctgttcttgaactttcagcggtcttggcttcgttctctcatccatatcgtctgacatgcctaatagcttgcttatatgtattgtatgtagtttgatgtcgtcttgatcaggtccgtaactatgtacacatcgttatagatacatgcagtctccctctcattttagtgctgttgtaatctcgccagcaccgtctcctccatcccgaacgatgatacctaggatccagacgttcacggcaaagaagaagagccctgcgagaaacagcccaggtacgaaggatgatagtcccaggaattcgagattgtaaccttggtgcagccagagggcctatatagttggtcagagttgaagccctgaagattctggtatcagaaaatcactagacaatacatacctgtccggcaatccatagtatggctgctgatatgcccagagccggtttacggatgagcgaggaagatggtaggtaaaatggaagcaggatgaggtaccagaggaaatactaaacagattagctgcgagtatgacaattttcggatggagtcacatacctgactggtacaaactttgttgaaagtgacaaaagtaaaagtctgcgcaagcatcgtagtagtcaagctcttctttgccaggaccagaggcaaagcaacaaccacaaggattagctgcggaaggaaggccagtgcctcaaagcgagtttcggccccacccgcagcagaaagatagagcagtgtactatagggagagaaattgtggcggtgatcgatacgagtaagatggtggaagaaagtgtgatggaggaacggttgaccgtgctggaggtacatgacgagattcaatgccacgaaactggccagtgctgcaactgtaaacttcacccgggacggagtaatgaaccccaaagcctttgacagcagacccgagccagtcgttacagacccatcgcgctcagcatcccaccaccagagaatggagacaccatagatgaacgggtaaattttgaaatgcacagcaagacccaggataagcccagcaaggacaggcttcttcgtcaaagttgcccagaggagcgccgcaacaagcacaccgagcagtccctccgaactaccacgggtactgatattggcaaccatgggattccacagccaaacagccgaaacgtaccgcagcgcgcgctcgacgggaaattgatagcatcggacaagcagctggacaacgagccatccagcaaggacgtcagacaatgcaaaaagcgcctttccaaaggcgaaagtcagtgttgaccaaggcgtggcaccttcccacgcagtagggagaagcatccatgccaagagcggcgtgtagcggtaagtatcccgagtgtatggcgactcgccctttgcaacatagcgcgcagcatcagtgaacaccatgtaatcgatgtcggtgtatttcacggtggagtgcgcatcctgccagcctccatagacgaggaaaatgaggcggagagctgttgcggcgagaaagactcgcgctggagagtcgaagatagccattcccttacttgccaaaaacaaacactctttttcgtcctttgataacaaccaaataaagaaatcaaaggttgctaggttgtctgttgcggctagctcgcataattgggcggcttgatgaacccctggcggatgtcgtcggggaaaggaaggagctgcacatccaactaatctttttggatcttaaaatctgtagtgactgtgggcatgaattaattcgccttccattccataccattccgcttggtaaatcggatgtttacgtggaagataattgttgatgccacctcgaggctgatatccgctgactcagcatggtccgtgtccacgggtccgagattgcctaatcgggacgagaagtatacctccagggctaggtattgcacccttaacacgggagggctgctatggactggctgttcactgtttatgccttacttaggcttggggtttgagtatagtctatctcttgttggcgtctctcacagctgtacactgcctcgaattcctggggctatcatccttcgtgcctgggctgtttctcgcagagctcttcatagaatgaactgcccaaaccaaggtctttacccgacaagaacaagaaattcccactaatctacgttggaactgcaagatgtggggaaaacgtttatacccatgtctatgtcttcacgtttaaactatgtatcaggcaccggctaaatgcctcgaatttgacgcttctcaaacgtggctacagtgaatctcaatagaagcgtaggttggtaatcctttgaactcacttgtcgcagggatgatatctccggatgtatgagggtcaataatgctgcgatcgaaggttctgcttgaatacaagcagatcacaataaacctcatttagactatgtgagcgggccatgaaccacacagccgcctcaaagcacccaaaacgagaccattgacaaaaggcatgtgcagcgtaagcgagaagtaatcccttccaagtgagacccatcgttacagctcgggcctgtacaacatcactcaaaccccttctgcaagaagccatcgtccaattttagaattcgaccggccaaattgggacaattagatctgataggttagaggccgtcagatgatgtggtctacttctatgctaaaaaagaaataagacaggctagttataaatctcatttaaacctggctatagtcttaacatagatcgttcaattcattagccagagatgtactgcagatatatccatactatctgtgtatcttatataccaggatacgaagatggtgatcccctgcagaggaaacgaagctatattacaaacttcattatctccccagtccgccgtatcttttcatagacatttgacaacttcatcggagcttggtgattatagcgatacatctccttgtttattcttctctccgttgaagagacttcatcatggtcctgggcatgggaaagtatatcaatcgagggcttctcaacccaaagtccgatgagtctgcaaaggtcgagaatgctaggtcaccagtgagctcgacctccaaaaagataaaattccgccgccattgcaggcgattctggtgcttctacctcatcgccaatgtgatagtcttggcgattttcctaccggttttgtaagtcgcagtttttacatattctcctgtttgtgatcaaactaacattgccaaacaagctttctggtcgcgattcctgcagtcgcgcaactagttgtcaacaaatcagatctacgactcgtcaatgccaaagtgatgcacccaacggcagatacagtacgaatgacactagaggccaaggtgaatctgaagcttgcactaggcgttcggctcgatcccgttgtcttctacgcatttgtgcgctccgcaggccacgagaatgcatatgcaggaattgagatccccggacaaactatcaagggaaattattcacttaaagtcaccgaccagttgacgccaatcctcaatatgacttcctgggaaacttttgtgagtcaagctgtctcccaaaaggaaacagcattatcactccatggagtgactgttggatatctcggggtcctgaaaaaccacatcatattggataaagatgtggtaatgccaagtgagtcgctcgctagagtggtattccacggtttgctaatcttcgagatagctttaaacaagtttgaaggcttctccatcgcgaacagtacattcctcttaccggcagaggacgatggaaccaatctcgttgccaatattacacttccaaacccctccgtcctcagcttcgaagttggcaccatcacacttgacctcaaaagcggcaatacagacctagtcatcggcaacgcaacggtcaaagacgtcacacttagacctggaaacaacacattcccgttgagaggtgtgatcgacattggtgcgatgatcggcaacctcagcgaagttcttagctcacagggccccgccatcaggacaggcgcactgagcctgacagctgtgaccagatctattgtatctaacggcactctaatcccgtactatacaaaggtcctcgggtcacttcccctcgtggcaaacgtgagcattggcgacgttcttagaaactcgctcgctcatctgggctcgagtgaaacattgtcagacttcgatgacaaacgcaggagaggccctgtacagttgggtggcccggttggatacggtgtcgcgtataaccaggtcgcaagtctgaaacacaacagacacgttcaaaagatgttcgaggatgaagatcccgaacgacgagacgcaattatagaatcgctggctcgatattatgcttcactatgaatgtacacttttacttcaattggatttaacaatacctcagtgacagttttcttcctgaattaaatcttgatatctggttcgctaggggtggatcgaccattgaggcaatgagccaatagtggtcatcatcctagtgtccaaggatgaatgaagctgttgtggattaagatcccatttttgtgccaaccgtatcatgaaaaacgagaaaaatcagaaatcctacagtacattgagatccttgaagcattgaatggaaagttaagtctgtcatacgttcatttccacatatcccctatgctaacatgctgagaattcacacaaacaaggcaataatagagttgggaagagaagagaagagaacaagatttcagtagtaaagcccgccatttgtgaaaaaaacagggtccggcatggcatcaaaatacgtcgattgttctccgaatttcagacctttctcatgatccggggtcaacaaagacatcgtgtcgttcctctcatcaacatcagcggcaatccccggccacaaattgttgtcactccaactcagatactcccagagatactgggcccccgaatcatccgtgaacggggtattagcgagggggtcaaggaacccattctcgcccatgttaccacgacatgtattagacgccgcaaatatgagcgacatatcccgatcagcgggataagagccaccaaaaatgctagcggaagaatcaggatcagcgaggtcctgcccccgcttgctagcctcgtagatacgcgagatagcatccagcgatcgcttcgccgtatggccaaaggactgcatacgggccagagtcatcatagccatttccacctgtacttgacaggactcaatggaagcacgggggtcatttaccgttggatcgttgaggaacaatcccactaagggcaccagagaagcctggaaggtccaccaaacagcattccatccgcacaattggttaagctgcgctgtagcggcaatattccgaatagattcttctgcgacttggcgacatttttcaatcgcagtgcgctcctcggatcgcagtgctatataaggcacacgtcgcatggcgtagttgagcagtgttggtcggtacaggaggatccgctggttataatagcgccagcgcattactgtgcggacagtttttattgactccgagcagggctggtggtctttcaggacggaggggaggttgtcccaccactctaggagctgtgcatctgcgtgggccatttcttggtgcttgactagcggtgctgcggcgagggactcttggacttgggttgcgattttggcgaagcgaatgttttccactaaggggaggatctcgaggacgtttccctattagaatgacattagtcaaacgatcgtttttttttttctttctagagtgtaacagggcctaccttatctcgacatagagggggtttaactgtaatgttcgagcctatccgacccatactaggtcggcctagcgtcatgccggcccaggtatccatgcagaacaaagaccaccagacgcggcgcttaagatccatggaggctagcttggccggactcgatatttgatgagtctccgtaaactccttgtgcaatcctagggcagccgccatacgcagcgcggcacccataatggagtatgctagattcggctgactgatatagtgacagtaccagccccccatcagtcccagcgcctggatagtctcgatatgggagcttcccaaggaactcagagttaagtgacccttgaatcgcaggaagtatgtctggtgtgttacatcatcgggtcctgtagcagcaatgcaaccgagagcaagaacaatgttcagcagagcaagccaatggtcatctctccgacgaccagagcagtaagcctcacggaaggagggctcatcgatcatgggagcgaaggcttggaaatagaggaaatatgcatcgagcatttgcatctctgaaggtggaatagggggctgtgagggtgtgggaggcgcaagatgcggccatcctatcgcattttcctgttcattcacgggcgtacgcgaaaagtacggggcacagcctggatccaaccagacaataaccttgatcacagcctggatagatgatacacccaggtaagatgaaggttggcgagccgacagcgacaagccattaacatcatctgagacgccctctactagatcagaggagctagtattacggctatcgggtagttcctcaggcatagtttgcagggcctcgaggttgtcatcgtcattcgataacggtgagacatgggcttccagcgaagccgatgtcgatggtgaatcggtctgatgtgacagtgcttgcatatgagagctcgatggagtggttatgagctcaaggagtttctcacgtggcaaatttgccaatgactctggagagaagttggggaataactttcccaagatacctcgatactcttccagggtggtagatagcttttctacgtgtctgtgtatattaaactggttagatggttggggttagaataaagcaatgggcaaggctcacctccgtgatggccgtgggtctgaatagtggcactggtctgacttcttataccaccgacatgcctcacatggcttctcgccatcacacttgatcttgcgatggcgacaagatgtacaagcgcgcaaggttgtcacacggcgactaatggaatcacgcctttcactagtggaccggttacgggcaggagttgctgccgtaggattttcgaaaccctcgaatgtatggaacattgctgatgctatgaattcacgaccaccgtgtggtcaatgagtaggccatatggatcagtagaataagagtgtatgatgtttccgttgaatcgagacagttcttcacattgtggaaaggtggcaagtcatatgtgcaaggagatagaaaaaaggttccaagcgaaaacgccgattaagaaaaagcagggtaataataagaaaaaaataggctgatccgcataaatatccccgcattttgttggatttgaacgatgcaagtctttttataggctagtgatctccgcgacaactgaggtttcgagtcccgacctgcctaatatcccgggaattgccacgccagcatgaacaggggtggcagatttgctatacagaataaatctcttccttccagtattcaaacgccacagagcgtgcatggtagggtactcggcactccctggtgtggcatggattccccgaagtgaggggcaatttccccagactcactttaggaaatcatcatgagccctgcaagatgggactagacgatcgtataggaagatcactagctctgcatgtccgttctcgcatggggtccagtaccaggcaatttccctttgaccggattttccaacctgtttcgccaatcaacgtgtcaaacctcttcttagcgccatgctccgtgtgctccggagtacggagtataccataatggctctaagcccgacgccgaggcctggaatgagggattttcacgaatcaaggagcaggtgctcatttccacttatgcttaccccgtgtatcaggaggggcaaggtgcgacggcacatctcgccactggggttcggtgccgagatactttcgcgccatgtctctttcgagtcaagggcccgaaatggggacacgaacggtcaggagttcacgccttattttctcttattctcgaagcgacaaagaggccaagagagtcaaactcgaaattatttaaagccagcactgtgcagagctccacgttttgatcattgatctccggggaaattaccggggcatgccaagcctgtgggatgaaagggagccgaagggtgcaggacgcccgttgcctgccaatgttcaaccgtcattggttcggttgtgactcttgtgacgaacgatgcatactaacggtaattggtgcaataataataagttcgatataggcagtgtcatgacctaaaaaagctgcctgcgcgcggggaaggcagatggtatgcaggtccatcagtccagagagtctgcaagtttatgatatcagaaactgatggaaagaaacccgaacatcaacaatgcatgttatgttgagcttgacgggaccttttccgtggccaacaaagctcttgggtggatataagaaccccaggggttgacattgctgagtgggacctcgggagatatggttgaaattttgccgttttgcaaattctcattctttcactgtatttgcagaatacaagttgcaaatatacaggtcacgtgccacactagtcccttttggacacggccaaaggaagtctccgggcttatcgataaggacaagtcggtctccacctaactatccatggatgtataagtccggggtagaccaagcaacctcctgtatattgccaattgcttttcaaaatggctaagatcatacactctctttcttctgactggtccttcaaggatcgggacaccgacgaatggctgccagtggcttcggtcccatctgtggtacaacaggatctcattgctaacaacaagtgagctgggtttgttagacgaaacgtttcaaatctaaaaggtctctttcaacaggctcgatgatccttatatcggattcaaagaattgaacgcccgctgggtcaacgagaagacgtgggtttaccgaaaggtggtggagaagccatccgtccccgccggctctgcaattgtactggtcttcgacggtcttgatacatttgccaaggtcaagatggatgaacaagtgatcttggagagtgataacatgttcctgggccaccgagtggacgtcaccaaagcattggaagcagaggacgaacacacgctcgagattgagttcgactgtgcactcgtcaaggcacgcgagctccgatcccagcacacgaaacataaatgggtcgggttcaatggtgatctatctcgcttggctgtgcgaaaagctcagtatcactggggctgggactggggtccagtgttgatgaccgcgggcatctggcgtgccgtacggttcgaggtgtatcaagctcgcgtggccaatatttggccccaaacacagctatctgcagaccaccaggcagctgatgtaacggtcgttattgatgtggagagtgtcggtgatcgggaatatacggcccagtttagccttggcttaaaaggaaacgagattgcaagcaagactatccctgtgtccgagagaacaactcaagtaaaattcccagtcgacaaaccggctctgtggtggccccatggatatggcgagcagactctgtacgacatgtcggtgtcgctacttcgcaatggtgaacaagttgaccagacatctaaaaagtttggtatccgggccgccgagatcgttcaacaaccggacaagcatggcaaatcctttttcgtccgactcaatggaatggacattttctgcggcggttcgtgttggattccggcagacagtctactccctgctgtcagtgctgagcgataccgcaagtggattgaacttctggtcgctggcagacaagtgatgatacggtaagttttgttttcctatgtgttctcggatgtggatttagctaacgttgaacaagtgtctggggtggtggtatatatgaagacgactccttctatgaggcctgcgatgaattgggagtactggtctggcaagattttatgtttgggtgtggtaattatcccacatggcctaagatgctcgagtctatccgtcaagaggcaatctacaatttggagcgtatgcgccaccatccttcgattgtgctctatgcgggcaacaacgaggactatcaagtggcagagtcagaaggcttgacctataactacgaagataaagacccggagaactggttgaaaacagattttccagcacgatacatctatgagaagctgcttccagatctggtggctaaatactcacctggcacattctatcaccctgggagtccatggggagatggcaagatatcgtcagattccactgttggtgatctacaccaatggaacggtcagtgttctctaacaaatctcgaatcattgcgctaatcactagaatagtgtggcatggaacgcaggagaaataccaaattttcgatactctgggcggtcggttcaacagcgagtttggaatggaggcattcccccatatctctaccattgactacttcgtcgagaatccagaggacaaatttcctcaatcccaggtgattgacttccacaacaaggccgacggtcatgaacgaagactggctacgtaccttgtagagaatctacggtccgccacagacctcgaggtatgaccacccgtgatgaccaccgatgcaggctaacgtctccagacctatatctatctcactcaagttgtacaagcagagaccatgatgtttggctaccgaggctggcgtcagcaatggggcgacgagcgacactgcggtggtgcactgctctggcagctgaacgactgctggccgacaatctcatgggccatcgtggactacttccttaggccaaaaccagcgtactacgccgttaagcgggtcttgaacccgatcgccatcggggtccgacgtgagcaccacgactggagcgtgtcacacgcccaaccggccaagaccagcaagtacgaactttggatcgccagcaatcaacccaagaccgtacaaggcagtatcgagctgcggttcctatctgtcaacacaggccgcgatcttcgggctccgatcgcgcgcgaaaatatcaccattgctgccaatggcaccacggacatcatcaatggtgttctcgaccacatcgccgagccagaaccgcatgtcctcgccgcccggttatgggttgacaaccaggtcgtagcacgtgatgtcgactggccacagccattgaagtatctcaatctgtccgagcgacaggtagaggtaaagaggcagacagggaaatctggtgagacggtgttggtgatcagtgcctgcaagccggttaagtgtcttgtgttcaaggagcaagagggtgtacagcttgcggacaacgctatcgacattgtccctggtgatgagcagacagtcagagttactggccttggaagtgagcctctaaggtaccggtacttaggacaagtctcatgcgaagtggtcgaatgagtggctactacctatgctatatagcagtgggcaatatgattataaggggcagaagcacttcaaataccaggcataattctcatgaatatcaatagatgtacgatgtagtacatattagacaacgactaagagacgatcatctcatatcttatcggccctggggagatctgaacttaacaacctccaactttttgccaatgggtaccaaacgcgactgggaaggccagccacttgagctgcatcctaaagatacaatcatggcagaagcagagtcagctccttcaatcctgtcaatctttgagaacttccgcgacgagctggacgagcaccatgaccgccgcgagcgtatcatcaagaaaagccgcgacattaccgccttgagcaagaagatgtatgcctccacttccagctcaagaagagcaccactaactaggattcttttagcatcttcgcccttcaacgagtccgcgcaacgaaccaacccatcccacctaaaatcgcccaagaaaaccaaacccgcttcgaccaaatccaggcactgttcgaagctgtcgtccccgaacaattagggataaatggctggcgataccagcgccaaatcagccctggaatccaggaattcatcgaagccatctccttcgaccactacctacgcacggaaacgctaatcacgcacgccgagtgctccgcccgcgtcccaccacaaatactcatttcagaagaagactacctactgggcctgtttgatctcacgggagagatgatgcgcttcgcggttctatctctgagctccgggaatacaactgctacccaagtgaccaagaacacaacaaacgaaagcgagaaatcgccggtcgctgcgtcccagggtggcatcgtggttgatctacgtgctatgcgcgcaggatttgaggcgctcagtgtgccacagcggcattacatgttccgggatatggcgaagaagctggatgtgatgcagaacagtgtggaaaaggttgagcgggcggcgtatgggattgtcgttcgtgggagtgagaggccgagtgggtggacgcctgatctgtcgggcgcgatggaggtggcatcctactaggaaactacgtatcatgaagtatccagcaatgatcgatggcttattttgattgacagcgtagtccgttatagttcggggggttgcatggctattcatatgccaggaactatacagaacttgacaatcaagtcttctcccgcttgatgtcttaatatcccctattaataacttactccgacattttatgacaatcgcatattccatattgacattgctgtaccgacaggtgcgtcaccgtgacatcactagttcagaacggtaaagaccgtagaagcccgttgtagggacaggttgggtgtaaaaggaaaagacaaagcatttccaattgcaaaaaaacaaagcaagaaaaacgccttcgtaaaacgatcgtgtcacccatatcccatagcaccaagagccaaagttacggccatgttgactgtagacggccaaatcagacgggcgagcgtgggttctcatcctcggagagaataccctgcgaaatcaggtcttcgggctgtggccggttctgaatcttatgctcgaggttatcggccagcatgtgcttctcgagttcacgggcaggggcctgcagcgctggggcagcggaggttgcggggaggatattaccttggcgggttgttagtatattgagaggaactcaggtaccaatctcaggcacgaaatgaaagtgaaaaaatgggaaatgggaaatgatctatcgaatcagaaggaaaaaagaaaggaaaacaaacgctcaaccaactcgtccttctcaggcctcttctccaggttcttcttcagactgtcagtagcacgctggcggtcgagcacctggcgggcagattgaatcgctctatccttgtgttaacgatcatatctcacgagactcatgggactattcccgaagcactcacggagctacattggtgtccagcaggatgtggcggttcttgaggtcctgcatttccgggcgggtttggaggtgtttctccagcgagttgcgacgctcgtaggttgggggaagtgactgctgaacggaggacattgtacttgtcgcaagtaatgatagtcaaagtgttgttaagaagtggaatcagtcgaggaatggagaaggcgaaagtcaagtggtggtcccgtgggacaatcacgcggggaaagcggcggtctatacatcgacaccatatcaccgtgaaactacaccaaagggaaaatatcaagaataatgcaatttactgggataatctaggataatctgggatgctagtagatcataaaacaaaaaaatacaatccaccttcataccatctcccagcgcaaaacagaaagcaaccgtctcaacgtctccgcaatttgacgatctcccatctccgtctcctaagaaaagggtgaaaggggaaaaagggggggcacaggttttccgaagtagacatatccaagcagcgcatcacagccgcgggtcgaatccaccaagggattcgtgtcttttcgtgtccgagatccgaatcatgccggggttctgggatcgtttatgccagaggaagagggaaaagcgcactctgcaggcaatcacagcaagacagatccagatccagatccccgcattcgggggtttattgcagtccagcaaagagaaaagagacacccctgtccagttctggatgcattggttcacaaaacactccagtctactgtcatcaagagatgatttgaaggtagactgttctgctcatgctaatcaaggaacccagagcttaccccggccacgaccattgcctcgtgcaccgcgcgaagatccaccacggcgactattggatgagcggcgagaggccccagcgttaccacgggcagcaccggtggcacccgcaacaccctgttgggtactcaagtctatagtggtcggcttggttgcgccgcccagagaccggctgaaagagtcggggtctatgggcttggtaggaacttccacggtaggtgtaggctcagcaggaggtggcgcagccttaggggcagccttgcgctgacccccaccacgcgaagcacctcgagtagttccttttccacgaccgcgggggacgaaaactagctcatcctcgtcgctctcttcctcgtaggacaacagagtcttcggttcagcgggctgggcctgagttttctcgacgtatttgcagcggtttttgtactcgcgctcctcgtactggatagcggtgcgtagctgcagaatgttcttgacaccaatgccaaacttctgagcccacacctgggtcgcacggtcattggagataagaatgcaggtcttggctgaattctcggcatcggggccggcatgcaaccgccagagcagagcgctcagcaatgggcgcagagcgggcggtgcggtcgggatgacggatccggagatggtacgctggtggttagaggacttgctcttggtcctgtcattctttgttgcttcattgccggacccgtgctgggcacactcggggctggtacgggaactgcgagaggatgtgcgcgatccaggtccactgggggtgccgacggaggtgatcgacaccgtctccgggtccttcttgaagttcagcttggacaagagcatctgcgacaggtcatccgactcgttcttggtcaaagtatcgcgggcgctagtttcgatcgctggctcgtcattgtatgtctcgtcaactacctcgggctcctcttcgaattccggcaggaagaatttctcggcctcctcccagcgctcgtattgctccatggggccctggagtagaactcggtcggcagcgatgtggtctttgccggaagtgacccggtcaagaaagcgaactgcttcgcgcgcattgatggcgatctgcgaccctgctcgcttcagcgcatggagtcgttcaagtgctaattagaggataatggttagaccggcaaacgctgcagtgagacaatcaaagtctcttcaacattcgggtactcactgtagagaggaactacgagatcgatagccccattagtagtccattttttgatttcgctaatattggtggagagggccgtctcgtccacggcacagcggaagaccttgcgtccggtcgacatggcggataccaaacgtactcgttcgtatgttggtaaagagtgggagatacagggcaaagaccaccctatatcgcaagactagaattgtagacaaccgcgactaaatcggggccagggtcagcacgggcctagagctgaggaaggaggtttgatgatggagggacctgggaatgtggggggggtaaggggagtagtgggatgtcggttgatagagccatgattttcactcacgatgagaatccagttgacaggatgtttccatctgcagcatctttgtaacaatacagtctgcttggggtcaaagaacgcaccttgagaaatgatgcgatgggcagagaaggaaatatgctgactaagcgcgttataggaacaagacgggatttaaagagagaagtgagggtttctatatatcgaagagggatacagtctaagaataggaagagaaagaaagaaaagatcatgtttgtgaaggaaagggttccaaagccatcatcccagcctatgacttcaccttcttgatgaggccgtccgattccttcactcgttgcgcccactcactggttttgatgttcatattagtactagtagcaacatttgaagtacaagggaaactttgttatacttacgtccaactgccgtcatatacccgacgcaggtttgggtcgccatattcggcctcactcagagctgtctcaatgatggaggcagtcacgccagtaccacacgagctgataattgtttggtttggatccaccttgtggtcttcaaaaacctttcgcaagtcttcaacggggagataggctttggtttcagggtcgaggagttcttggaagggcaagctcttggagccaggaatatggcccgaagagaggccagggcgcggctctggatcggttccagcccagcgaccataggagcgtgcatctaggatctctatttcctctgcaccttctttgccatagtcaaatgctaactccttcatctctcggaaggagatcactagtcgcgagtcgtacgtcggaacagagtacttcgacttctccaccaccgctggctcgccgctctcagtcggaagaccgtctttgatccagagacgatagttgttgaggatatgtacattgggatggccgaaaacacgaagcgtccagcctacacgcggcgcactgaatatgcccagctcggcagtgtcgtataccaccaccgagtcgtcgcgacggatccccaattcgctcatggcctcggcaaaggtctcgcaagtgggaagcatgtgtgggtagggtgaatcttgatctttgatagcatcaaggtcaaagaatcgggcctgggggatgcgcgagttacggaacgagtcaattcccttgcgtccctctgggtcgttcggcatgaaccatgctgcacagagaggaatcacgcgcggggaagttgagatctttgtccggggattcttcttgagtgcttcattcagctgctttggggtcactagatacgaagaaaaagagacattgcgctgagtatggagccctgtggagaccgacatgttggggcggaagagacgagcagaagcaaaggatctggcagtgaaagccatggtggagaggaaagaagctttttaaaagaccaatttacataacgaggtagcaaagactcggggaaatatccaaatgcaagccagaccaaccacgagtaagaggaagcggaagagcagggaagagcaataagaggagtactattgcgtgttatggcggcatgtgtggaggtgcggagagtggacatgtgataggaggctgataggagagataagcggtgttgaccgatgctttccctctcttcacctttcttgattctccactatcccaccccacaatgaaggtcgctattaaagaatggaatgccgtcgctacttggcattggaatatccccgaggacgaggtgtgtggcatctgtcgtgtccagttcgatggcacctgtccaacctgcaaattccccggcgatgactgcgcacttggtgagtgaacctttgactcccaattccatacggaatactgaccacggtgattattatagtgcaaggaagatgtaaccacgcgttccatatggtaagactgcggagtgggcatatgagctatccctagactaatcaacactttggaaacagcactgcttaatgacctggattgacctggaatcttccaagggactatgtccaatgtgccgacaaagtaagctttactctgcattgtctgtgatatcgagctaactgtctccagaattcgaatggaaggacaaggaataacggcccaatttgtgttttcttcttctcatcaatggttatcaaggcgttgtcggacgaattcaagataccccctttgcatttttgttgggcgccaaattagattggaggagttggtgggacctcaatctcaactgagcatcaaattaatcccgtggttggagcgacttcgattaaaccgagtttatacttcgtattcgaccttccatttgtcgatatatattgttgcagatcgcgccatagattagtcgactcatacaatacccaagccccaaggagcctaccaactaccatataaatacaatcaccatgaagaacgcagaataatcctaacgtctcagggtgaaacatgtaccaatatcaaagtcgcttgatcccctcggaaggtccggccgttgtcgtctctcgtctgatcgtcacgtggcgctatcgataagaagctctccgcacgcgatacagaacctcgtcctaacctaagctcctctccagaatgatgtagccttggcctatggagatgtctctgaacaactctccctatcatcctcccctatcctcttcttcgtctaggcagtccctgcacaaagaagcactgtttcgaccaggcaccgcctcttcgcggccaagtgatcgacagtccagagggcaactgcctgagggccgctcatcaacagacgaaactcatcaacccccgggaacaactgccttgccctgccaagatgaagctctggatgagaccgaagatcattctgaggaaggccaagaaaatctgactcatcccacattccagccgttcttcgccttgattgaagacgcccatacctcagactaccaccacccaacagtccactacatattctccgacgatgacaccgagatcgtgacagaggcagccctgcgtagcttggccgcgcagcaagaagctctttccgattccaagaaagatcagatcgcgcagacccaatcgcccactctgcaggacgagatgaaagatccctccgacccggacctagccaagtccaccctactcccaccgtccgttccaggtatccgagataattatgtcattctcgacatagagccctcaccacacacacctgacgtagggcaaactagtcctataaccgaacaactagcaccgggcaaaggcgggggcggtacaaggtccatatcctcgtcaccggcgaacccttccgtgctcccacaggatcaggggcagttacacccgcagtatcgcgttaccgcggcgcagagcttctcgtcaacttggcaggttctcagtacggaagtggcgacggcgcccacctttgagaataacaattccggcgaatcaccaggacaggggttgatgctgaagatccgtggcacaggtggactgccgattgaggtaggtaacacggagaaggaccgtacactggaagagatgatggaccagtttgcaaagcggatgagcgagttgcaggttgttatcgatgctgcggaggccgtggatttgaaagaagaatataccgaagaagaagttgtgcaacatcctttctctcaagacacagctgaagagactacccagggcgagggggatagtgctgcatatgctgcaaaggttgaaggggaacattcttgatgattttatatttgctgtttttggcgcattgtgcggaacatcggctgttgtactaagtctagtctattaacaggctagaaccggtaaaccttatgaatatatcttgaatacaagatgaatcaatccaaactaggagatcgggtatgatattaagatcaaatttgacatcccgataagaatatcaatgtagttgaaccggaaacgccatgtacagtcgcctttctatggaactcagacaaaagaggagatagaagagaatgtccaacccaacactgttttctcagccaaaaactccgacccagagtggaaagccaagcgactatcgggtatcaaaaatcgacaagaaaggagaaaaaaccaaaagcaaaaattaacatggagtccacctaatcagaggtgcggtttctgaaccttcgactaccggcgatggctgaagggggcatattttcgcgaccctccttcatgccagccatcctttttgagagcatggttttggggagtttagtcccgggattgttggttgagttcgagcggcgccgtttgcgggaaggttctggctcttccttttctggcgtttcgtccaggtccaaggatgtggccaacgcgggggtttctggtttgatgggaggtagtacgtcctcaccatcagacacaaccggtctggcgacgtttgagtcgacttccctaaggccagtgttggatggtggagctgcgaatgatggaagagagtggcctacctcttccggggtatcattatacacgaatttcttggacggtgaagcatgtggcgaagtgggagcaggggaatctggttgtcccccctcactgaatggcagagcagtaaactgcttggatgtccggtgtcgagtgcgaagaccgtcgtgagcttccgtttggggcatttccgaagggtattcgtagcgtcgtttctgaggggttatacctgttcgaacatactctttcagggggcggctctggatgttggaccgcatttccaaaagtggctggcgcacttcagcgtgtaggggtgcagtagtttgttccaggttcttggtaagcatatcgacatcctcctggagttgctcgacgcgtccagtgaacgtattgagttgcccatagacgtttgagcgtgactctcggaccgtattagccatggtattcaaactgcctaggtgtgattcatggaagcggccattctgggaccgtgctttggcaacgaagtcatccaaagcctccatttgtgtgctcatgtcgctcatctgagcatcaacaatgcgcacagtctcttggtgcacagattccgttgcccgatgaattgaggcgttgcgctggtcgaaagtctactgctattagtttcattccgcaacccaaggatgtcagtcggtcttacctcccagtcattctgcatcctggttttgatttcatccttggatgcagtaatgtccttggcaaactgctcctccttgaaaatccattcatcaatgtgcctgtcgtgctgcgcagtcgcttgctcaagagagtcgcctgatgccgagatgtcggtgcgaagggtattaaatttgccctgaaggcggttgttctgtttcaggcttgagtcctcaaggagtccccggatgtgagacataagagtttcgcgctcgacttgtgcactcgcatgttcctcttcgagaacctgtgctagattgaatgaagcttttctattggcctccactgtctgacggttagctgcctgcagctggagacgtagtctgtggacttcggatttctgttcatcgatgtgctttgccatgccctcgaacatggtcttgaagtctttgccgagtgtgctgtatgacgagtgaagttgcgagtgaaactctgagaactccccaatgacctcttcggagattcgagcagcagcagccgacaagccattcaggccttcgccaactttggacttaacctcttctcggaggaccttgatctcctcgagaacttcattcatcttgtcccgggcagtggatgtgttattcttggcctcggcctcagcattgtcaaacgatgcatcaagatccttaaggtgggagcgggtagaccgcacagtgtcgagttcatggtctacgaattggtggatcttgctagacatctcctcgagcagcttcgcatgctgcgtctggaacatctgcatgcgagcatcgactcgctccgtgacatgcgatacctcaccggttgaagcctgccatgttttttggttatcagtctccaggttatctttgcgatccagtttcgcgtgcagtccattcacgtcttgaatagttccatttaaggtagtcaccaggccggcaccaatgtgacgaagttgcttttccgtattttgatgagccttccgcacaatcttctcctcgtccagcttctcctgggtatccttccaaaacctttctgtttcgttgagcacatcgcgcgtttctttgagtttggactcaatctcctcattgtcatgctttaatgagttgaagttgcccgtgatcaaaagtagctcttgaaccttgtggcgaaggcttgcctccatcgactcgatcttggcacgctgttcctcgttgacgatgcggcgcgactcactttccatcgtcatttgttcaaacgcatcaggcgtcatatagacaccattgcgatgccgggtggcaatgagctcgcttttgagcttctgaatttccatcccgatatctcgcagaagcttagttttggtgattatagaattaatctggggtttgttgcgaatgttcttggctcgaaaggcataatcaagggtagatatggtctcctctaggttgcttcgggcaggcgagacggtggcgatgatgcatgtttttgtttgccctccaagtgaatcttgtagcagtctcgtaagtttcgactcgcggtaaggaatgtgggagctcttatccaccagagcgttgatcaccctcccaagagtgagtagactcttgttaatgagacctgcctccgtcgcccgtttattttctgcaccgctccgtccgatattttcgctacccgcgagatcaaccaggttcaacttgcccgagctgacatagtcctccccagattcggtcgtgcgatttgtgagcacggtgatggtaaaaactgtatggcttcgggaactcaggtcattgcattttgtcgctgccacttggcgtttatggctgcccgattgaagtaatcggattccggtggacgcagagtcgatgtaagtctcctccatgccctgaaccatggtgccgtgtcctcccttcttctcattttcgaaaatcttgagcttggtgctatcgtcgtatgacagaagatcgcgaagttcttcattataaagttcgataaaggaacatttcactgtgctttctgtgtcctccagcttgcgaaagagggcgtaaagcgtacgcggaataattcctgcgtcgtcggagaggatgcccaatgtgtcattcatgtctcctgacatggtgtatgtctttcctgttccagtctgtccgtaagcgaagattgtgcaattgtaacctgccaacatctgcaaggaattagcgcggtcctttgggttcagtcgcggcgactatactaacctcgtcgaggaccggtacaaccacatcctcgtagacagtagcttgatcggcagccggggagaagaccttgtcaaaagcatatgtcttgtttgaaaccgcgttcggtcccatcgagagatcgagggttttgcccttcacaccctctggtgttgacaagactacaccgttattctccttaatctcgcgatcactgcgaccgcgacaccggactaccacatggatgcttgtgtcctcgttgatttcccgttcgaaatctttctccctcctcttattcgcagcgcccgatttttctgggctcctcgccacacgagctgcacttatcgcagaggacctcactgatggcgtagacactccaggtagtgcatggcgttctggggctgccgaacccgctcgtcgaactggttggcgcaaacccgacctcctcgtggtggggagggtggatggaggccttggtgggccagccatgttgacaatgcgacactcggaatgtaattgtggtattatttagcagtaatattcgagggtccgtctgaaagttcagttgatcttttgatttgatattttcacaagctgtgtcggagtctttcacggttgtgtatatcagtggagcttcgtctcaaacaggagcaacataaacaaacattacgtaatccaatcatttccccctcgcacatgactcggttggtcggctgcgctatcgtcatcgctctcttatcgttatccttccccctcataccgtcccttacatctccagagcctccccttttaactacacaaagctcgactatcgtatggacttttgtccacccatgaacaccgggccatgaaaacgaacaaaccatcatgactacctctacttcctcagcccaggcgcaaatcttccctgggaaaggactggggtttatcagtatgtttctttgtctaacctcgcagccttttcagcagctctcgctaatactcttgaagccttgggtgcttcgctccataatgtccttacccgcgtcaagtcctatccccaaacctatcccgccatcgacctagcctactcccccgcagatccgctccgcaagccggtgatattgcagttaccttcaaatggcctgcgccttcgatttgacggtcccgaccagaggctccgtttgattgaagtagtcgacttctctcgagtaaacctggtatacaaaaatcaggatgtgctcaaaggtgggaagtcagcagaacaacccttgtcctcgcacggccctagcttccggcacgtctacaatcgcttgtttggcccctcatacccaggagaatacgtacccccggcagacccacagtcgccatatggaacctacgtcctttcttatccgggggttgcattctcgtttccccttcagcactctgcctggtcagatcagtgtgattttgtagcgttgctatcttcctcagctgcgctcccggccacatccatgtcgatcttccaaggggcatcatggcctgaggcccgaggcaagttgttcacacaacaggcacagtacccacgctcgtcggctttgattggaaaatcccgagaatcgctagcggatgaaatcgaggagtggcatgtcctaggtgctggggaacttcaagtggctcgcaggacgggctctccattatacataaaactgggggagacgactccccaggacttgattgcagacttcggtccacccgacgcagtctaccgtaagaacgaccgccggatctcgatccaccgtgcaactgggggtggggaatctcacctgagtccctctccgggcagaggaatagacatcccggacggcgaccactcatccactaacagcgtaactgatgattctgacgaagagttggctaccttcaatatcggagaccccacctcactgcccgcagaatgctttttgaactacttccaccatggattcgatgccttcatctcgtatccgactacacctggacctgctttccccgcctcgggtcttccagatccatcgcctcagccaccatcctcccagctgacagtgacaaagattattcttcatgggaacgtcccaggttcttatccatttaatcgtcaccgccgaagtcgctggttaatctcgttggatgaatctggcgattgtctgacttcggaatcgacatacgatgaaatctcggagcggctgcgggctacttggaaaggatcttacgccagccccgccgaggagcgtgctctgcagcggccaatggtactgaaccgcggctggggagacagccccgagagcagtgttgagttccttggtggttgggaggagaccacagccaaaggtcctcggaatggtgccgatgggcaggatggaggattaggtaataccgagctttttgggttcccggggcttttatttgaagttctcaagaatggcgccgtgagttgtttgacagtgtactgatttaagactattgcacccagcgcttctcaccatatctcaatgcattatgaatcatgataatcctggcttggtatgttttaatgtgaaactatatgtgaccattcaaaacctggattgtagatgtaaattgtagaattgatacctaatgtccattctccaatagcctcgcaatttccgtttgattcaaatttcttgcccactcaatgactgtacaaccatttccatcctcgatgttagtatccgctcctcgaccgagcaagaaccttattgcatccagtttcccaagctctgttgctatgtgtaaaggggttcccaaactcacaggatagaaccgcctaaaggttggataatcctgatacattgggacgttcaaaggggcacctttatcaataagtagcgccaacacttcattgagatttgtccgccgataaatggcatattgaaggagctgtccctgttgtacatcacctccgcggcttagcatgagctcgatgatgtttataagagctagctggacagcataagatagcggagtacagttaatatcacatcgttgattgggatttgctccatggtctagaagccagttcgtcatctcttcctcgtagattgcatagctatggtaacgagttattattgtgtttcttttcaagaaatgaaagcaagattctcatccttcgaatcactgactttagaacggggggatcaaggtcacttatacgttcattgatgtcccatcctttttgcatgaagcatttgagcgctttcttcgatttacatttcattgcttccaatggaaaatatgaatgtatcgtaagcccacggtcgagaagttctgaaatgaattgagtattgtcttgcttgattgcctctaccatcaccgggacaagttcctgtatgacatgtttcgggctcgagggcagtagagcgatagtatcattgaaggattgtatatctcctctgaagcgaaatctgtcaactgctcggttgtttctttcgggatttgacgtgggatgtgaaattgatttaactcgatgggtgtaatagatgagataggtggctcacacaaccatgatcgaagatccatgataacacacaggttatctgtgagagcaaaaatgaagtctcctaggaggtgtgagatgtacgacctcagcggggttgatgatgtacgacaggtctcgcagtgggcttttgccatcttcccccctctaagagatcggaatctcgtataactaccaacagtaagcgataatagatatgcatctggccctgtacattgaccgctagttccccgttgatttgtttctcttcctataaaatcctacaagcagaaattatatcccttccactcttactcctctgaagtcccgggagatttggtccctgtctctactccatcgattgttttctgtttggcagtgatcatgtctaccgactcagcctcttggactactgtccaggattttctgcaaaaaagtgatagccaaactgccgagtgttttcgtcgaactcaatgggatgagctctgtccaatcgcttcaggtcttgctggacacttggagtgcgtggccttagaccaggttgctagcgggctcaatcacattgtccgtttgctaaaattttccgacgagactcgctgggcggcccgggttcatattagaaggagtacctccccccttgtcagcaagaccagcctcagaaacgaggttgcgacaatgcaattcatcaaggaacgttccgtcttgccagtgcctcaagtctttgcgtatgaagttgacgagaccaacccggtgagggttccttttatactgatggagctgctccctggtagcgtcgccatggacgccctaggcggctacaacgtccatcgcggtataatacccagaaagctccgaccaaccttctaccgctccgtcgcaaagtgccatgttcattccccccgcgctatcaagcctatataggctcacctcgatagtcagctgcttacctcatcctataggtccagttgacttcgttacgactcccaaaaattgggacgattgtccgaaaccgcgacggtaggtacgagtgcggtcccttaccgggaatcggcggtccattcgatacagcaaccgaattcttcgaggcgtgggccgacagcgtcgagtttaagtgggataaagagacaatcacaagtatgatgcagagaagtccgaaccctgcagaacggatgatcgcgattatcgagaatttcccgttacaaatcaaagctatggctagccggctatcctcgtgtaacgaagggccattccctctagaccatgatgacttttttcatagtaacatcatggtggatgagagcttcgatgtgacgggaatcatcgactgggaaggcgcatgtacggttccctatgagcttattgcgttccccgacttccttacagccatgcctgtctccttcgacctgccccagaaatacgatgaagatgggcagccgttcgatgaggaaattcgagaaatgtggcgcgagcgagaagggtatatcgaaatggtcagattagccgagcttgacgacagtgtgctttcggattgcctcagcagcaagaggagccaggctatagcttatttgtatggggcgtatactagtgttggaaagctgggcttttatgatcaagctgtgaaagagatagagaggggagaataaaactcagcagttcccctatcctggaatgataaaacgaagctcttcgtagagttattgggcggtggaacagcatcaaagaagcaatttcctgactcgaccgtactttcgggtgggatactccttggacgagccacattgagagatcctctgcttggtaaaagactctgggcctggaatagaaggtgaatgttaggcgcgaccatgcagtgtccgatcaagtatccaagtccggcggagtctaaaccctttgtggaatagccatgttttgtaaaccgccaagacccttctcttcttgaccttccactcatcactttctaggatatgctggacaatgccggaactggcgcgggcaatccctcgctcatggacctcgacgttgaaactgcctaaatcctcattccctccacgcgtatcgcctatcgatcggacgaaatacctaaaacggtgcaccgatgatctctacgcctggcaacgccgcgaaaggcccgccgaccaaccattcgtcttgcatgatggcccaccatatgcgaatggcgatctccatgttggacatgcgctcaacaagattttgaaggatattatctgtcgcgtacaattaggtcgcgggaagagggtgcggtacgtgccgggctgggactgccatggactgccgatcgagctcaaagcgctccaaggcctgcaccctgaggacattgcaagcggatcagtcagcgcagcggatattcgcacgtccgcgcgtaaattggcaagacaagccgtgaaagaacaaatgaaagggttccgtggcttcgcggtcatggccgactgggagaaccactggaagaccatggacaaacaattcgagatgcggcaactgggtatcttccgggaaatggtggaccgtggcctcatctaccgaaagttcaagccagtttactggtcgccttcaacgggtaccgctcttgcggaagcagaactggaatacaaggaggatcacatctcgaccgccgccttagtcaaattccctcttatcgatatccctacgtgtctctctgagaatcctcttcttcgtggaaagaatttgaatgctgtgatttggaccactaccccttggacgctgcctgccaatgctgccattacaatcagcgagtctttggaatacgctattgtcttatcggaaaaacatggtcatcttctgatagctcaatcacggttagagtacatccagaatatgctgaaagaagaactctctgtcattgtaccgtctatcatggggtccgagctggcagagcgaactacctatcgacctctattcaaaggacccgaagctcagccgcagcccatcttcgccgcggactttgttactgctgattctggctctggcctggttcatagcgcgcctggtcacggaatggaagactacgaagcatgtcttgcgcgtggcattcctgtgttcgctcccgttaacgatgagggcaaatacacagataaagctatgcccctcgatcctacacgtttaactggaaaatctgtcttgggagaaggtaacaccgctgttttggaatgggtcgaatcgtgtggtcagttgcttgcccaacataagtacgagcacaagtatccttacgactggcgttcaaaacttccggtcattattcgggccactgagcagtggtttgccgatgtggccgatatccgtggcgatgctcttcgcgccttggaagatgtccgctttgttcccgagactggaaagcaacggctcgaagcctttgtgaaaaaccggagtgaatggtgtatctcgcgacagcgtgcgtggggtgttccgattcctgcaatctatcaccgaaccactggagaggccgtcttgactaaagatagtatttcacatatcatgaccacaattgaagagcgcggaatcgatgcttggtggaccgatgctgcggatgaggctgcatggattcctccgtccttgcgggacgaggctggagcggggtatcgacgtggaatggacaccatggacgtttggtttgacagtggtaccagctgggcagagatcgatgttcctatcgaaggacggagtcatccagccgacgtgtatcttgaaggtaccgatcagcaccgtggttggttccagtcctctcttctcacatatatctcgcaccagctcggctcgggtcaattcacgacgcctcgtgcgccatacaagaacctcatcacgcacggtttcaccctggatgaacatgggcggaagatgagcaagtctattggcaacgtaatccacccgcagaccatcatggatggaactttgctgcctcccctcaaaccccgcaaaggcaaaggaaagaagcaacccgagaaccaagaaccgatgtacgacgctcttggccccgatgcgcttcgcatgtgggcagcgagcagcgactacacgcgcgacgtggtaattggaaaacgagtactccagaccgtcaataccagtctccacaagttccgtgtcactttcaaactgctgctgggtgcccttgccgatttcagtccagcgaacgttatcccatatgaacagctgcagctggtcgatcgaattgcactcaagcacctctcggatatggtactcacgtcacagaagacaagtgataacttcgagttctacaagggcgtgagtacgatgaaccggtgggccaacctcgagttttctgctttctacatggaggcgatcaaggatcgcctctacacccttggtgaggacagcacgagtcgccgggctgcgcaaacgaccttattctacatctacaattatcttcaagaggccctggctcccatcacaccagtgcttgtggaagaaacatgggaacatactcccgagtctatccgcaccgagtctgagcacccactgcagcgtatcgtctccgcccccgctccggagtggcaggatttgaccctggacaccagctaccaagagctgacggtggttcactctgccattaagaacttgcaggagcaggcccgtagtaaaaagcagcttggctcctccctgcaatcctttgttcacattgtgctccccagcagctctggattattccagcagtatctgtcggagctccctgatctctttgtcgtgtcttccatcaccctgtcatcccacgatgaagctattccgaccgacattaaggacgctgaatggcaatatgaggagacatttgagctaggtgaccagccaggcaaagtgtatgtgtacgcgccacaggcctccaagtgcccacggtgttggcggtacgccattccgaacccggtggcgatcgaagatgcgatttgcaaccggtgtgagacagtgatacatgaggcaaacgcctagagaactgtacaaaatatgtatacttatttctatgtattatagctagctgtaggtgattggacagagcagccaatttaccaactgcagtgcaaccagtaatccaaaacatccgacattcacattgaaaactagactgaaagaaagagtccatgtaattaatgtattcaatctatttgtccatccagtgaatgttctaaatggctatgacgacagtatccagtcaatgacggtcgccccaatcatccccaaatcctgctttgatgcaacatcatgtcatctatatagtcttgctcttctcgtttcttcttcttcctctactcaacttcctaaattcatcatgattcaacctccatttgatcagtttgctactctaacggcgcccgccaccacgtcctcggtggcgcctattcccactatcattccggggtatgaggtctaccaggaacttcatgatacaggcaagcgaactctttggtatgtatatattatactatgtattcaaatgtttaattatcctaacatttatagggttgtcactgtgttgatgggcgtttcctcgctggtgttctatactttggccgctcgtgctcctctagtgagttcatctcttctatatcatatatgctctcttctattattcatacctatctaacatatgtccagtctaaacgaatctttcatatcctcacctccctgataaccacaatctccttcgtgatctacctagctctttcaacaggccagggcataataaccaaacacgacagagtccacgaatcccacaaacatgtcccggacacccacacagactacgctcgccagatcctatggctgcgctttgttaactgggccatcaccacacccctgctcttcatcaacctcgcccttctatccggcctaccaggcgcaaacctactcatcgccattgtcgcccacctgatcatgcttacaacagctgtattcggcatattttcaggacacggccgcgagcgctgggtctggctgaccctcacatgtatttcttacctggtcgtgatccaccacattggcttccacgcacagcgagcggcgaagagcaaggatatccagacaagacggttctttgggtctgtttctgggtctgcaattgccatgttggcacttttcccaatgtgagtgatatatccaaaagagcactcttgagttcaaaccgatgctaatgttgggtagttccctcgcggctggtgctctcgcgctcagactgagtgttgacacggagactatccttttcgctatccaggatgtcttcacgcaaggtatccttggatactggcttctgttcactcatgagagttcgcctggaatgtaagtctcaagctgaatctcggtatgacgacatgctaattactgcagtgcactctacatggaaggattctggtcgcatggtgtcggcaatgagggagctattcgtatctccgatgaagagggtgcgtaaggaaataactccacacattcagactaggattctggtgataggatatttgttctctcttttttttttttttttcagttgacatttctctcacttacgagtcaatttggtttaaggcgttaggattgaaaatgagtatcaggatgtttactttgacttgaccctactatttcatatgtctgttctacttattgcgtactcttttaaataagaagcagaataacttaaaaatatttgctttttttggggggttttctaaattgtctttcttgcgtagttgaatgatatttccctggcggcacactcactagagccccctagggaaggctctagcgagcgtgccgccgcccatgaacacggaccccgtccgtttagaacacccccaggcctcgcactgcggaagagagctcggcaagctcctcgtcactgagctcctcgacggagttctccccggagggcccgtcttcgccccgggccactccaaactcgcccgcctgacgaactcggacgtttcgctggaagcgagggagccagaaaccgcagtcgatgcagtccttcttgaagtgaacctccttgaggttccggaaccacatgccaaaggggtccccgtccaccgcgaagccgctcaaggtgagatgctcgacgggcaggtaggtggggacggggaacccagtggcaagggcaaggacctttgccttctcgatgcagtacttgtcgaggtactcgccgtacccgaccttggggctgacctccccgtcgccttggccactaaagtcaatcaggttagcatatgtcacgtctcttggtatcacattactctcagttgggcacaacttactagtatacgggtgaggcatgcgacttcacattcatcacccagcccttcttgatgggctcccagccacttggtcccaccggctccacaatctccaagccaacagccatgtgcagctcgagagtggtgagatgagggttcaaccaaaccgtcttccagatggcaggctggtaggacttcatcataccaaacagcttcagcacacgcaagttgcggaactcagtcaagggccggacctggtccatggtgagaacactgactttgatcttgtcctttaggttctcgaagaagcggtcgtcgtcgatggtattgtccttcaaggcctcgttgatgatactgctaattgtttcatcctccttgggagcagcgacttcaatgacttcttggtcggggtaacgaggcgcgtcacagatgggaagatcttgcatcccgaactcattggcattgtacaggtcccaatcgtggacagcggccttgcctttcgcgttcttgttgttggtcgggctttcggcctcagagctctcgaaatcgaacattgtcatcgaggagtcaattgccaagttgccatcggtggtctgattttcgatagcacaatcagtgttgaccccagcctgctcagtggtgactggcctggcagcagacttcaaggtgggagcattgtccccagcggtagcaacacccgtcagaatatcatcagactgggtggccttgtcagcaggcaggctgtcgatggcagaacccttgatgtcgggctcagtcatggtggcattgtcgatcatggtggtggttttgacaggacattcgacgtcgaagtcggtcatggtgcccttgtcgaccatggtgacctcatcagtcatagcaccttcatcaagaatttggtcatcgtcgagatcaacaatgctctcaggggagaccttgcgaacatcgaaaagcatgttcagttctaggaccaacttggtgcgagggatatcatcccaagtgccaccatcattgaggtgagccatcaagtggacgaaagaactggtatctgggtgaggaggagccatagtctcaggttgaggatcactctgttgctcaagccagtcttgaaagctgagaatgctgagatggttgggggccactgggtcgcaaggataagagtcttcagaggcggtgggaggtgcaatgtcgatgttggtagcagagggtcctctgtagagagaacggaaaatgggacgtggagcaggagggagtgggggaagagaatattcaggagggaagaaagttgtaggggacaagatggaaggacgtgtcggtgtgggcttctggagttcaacaaaaccctcagtggacgcgacgatgggacctcggtgtctgagactcagactcttaaaggaaggaaggcgccaactaccctttttggaactcttcagactctttgtgggactcttctcaggtgagttggtggtatcagttcctgcagaggagtgaaggaatcgaaggttattgaaagaagcaagtcgagagagtgggaaaagactcttcctcttcgttgggctctttccagaagcgcttgtgactgtcgtctgaacagggtccttagcaggcgactgagcaggtgactgaacagggcttagatggggcggtagggctaaatggtgacgggagcattagcacgaactatagcaacgtatagcaaccagcatgcttgcatgtaaggcattcaatgtagcaatgctacgatgatgcagcacatgtaagaacgtgtaagaacataccttttctttcacctgcagtaagctgctcaacatgttttgttgcatcttcccagaaacggacacctaggaggctgttctcccattgatcacgcatatcacgatcatacatgctatccatgatgaattctggattaacaacaatgaaatttggatgaaagcaagtatctgaaggataggaaggatgggagaaggatgagaggaaggggaaaaggatggggaaaaggtacttcgcatgggtgctcttcaagcgtgcgctccccgcgttaacaatcactgggcttaggtaccatttgcgcgagtaaagccttcgctgagatcgaggtcgagggctccggatcaactctacacgttcagttaaaacagtcctcattatcacactacacgtcttcttcataggatgtggttcaacaattcctgacttatcctctataaaggctaaaaatatagcacagcttcactggttctgtcttctgtcttctaaagtacgttcaaggaagacaaggatatcctcaatggctcattcgagttggagaatacccaggcgtctctgtagttgccagttagagtataaaagcttcgttcgtctctaatagtctggatgcaatttactatcctggtagcaattgtagctatacaagaagttgcttctttgtgttcatttaccttaagatgttcgacactaacaatctagttatggcgtgatatttattgtaaataacaggtaaacattctcctgttgatatcactggcaataaaactatccggggcgatacctgtttttaaaaggtgcaatgcttcaatgcgtcaatagtacatactcgccgatcttggtcttttaggtttaggctagtgacggcccgcgacggacacccgccggtccactacctgaggacctaaggctccgatgtcctagtaacatcctatatggccttctagattcattggaactagtctagtcccgatggtcttctggtcaattaatccggtgcgttaagaaatgttgccgaggtccattctgcaattatcagcggaagggcgaggtccactcagacagacaacgctggcagagaagagaagggtggtgttgagaaatggtccgatactaagaaatcattggctttgtaactgatggtgtataggattcttctatttgatgaaccctttcttggccttctccagacgaccgagacatgcgagcatccgtcacacgtcgctgatattcttgagactgttggaagacagcatgatggtttttttactgtcaattacattcgccttcgctttgttgttcaaaagacagagcggcaccactattgcttcaggaaattccaatttttagatatgatttatgatatttcttgcttcaatcgacttgtgaagccccgaggagaatgtatgaggataaaaggaatatactgcgtattccgataaacgaacagctgcctcttccaaggagcagctggcgacgttcacggtggcaaggccacgacgtggctgcttttaccgcgcaacctacccctgtccggtaaaaggtatagtagtagctaatggcgccgagcgagcgatcgaagtacaaacacacgacttatttacattacaggctactgaaggtgcgggagcatactcgctccattctattctctatctcaagtgataaaggtggcattgctcgggtccaccgggtctatgtcggaaagcccttacaatccagaaggattgggaaacaaggtcaagagacatgatgtaactcctgagatgaaacaaaaccagaggaagatgaaggaatcgcgtaagaagctaaacctatttggcttacagcctaatttggtgacccaccagtatatgcctccagggatgtgagaaacatatacatgtaccggataatgcctggcactcgagaccttcccctttccgttttagtgttcactgggtgagcggcctgagtaagctacatcaataaaatgcgacatgcttgccccgtcacgtgcaactcttcccatttagaagtaggttgtcgatctgccagcctgagcctaataaaataaactactaggtggatatctgtgaaaaagcaagctttgattccaactttctaacaatacatgtagcgataatgctcaggcccccagaaagacatggcggcagcacgcagcaagatcctcggccgtgaatgtgtgctcaggctcccagaaagacatggcggcagcatgcagcaagatcctcggccgtgaatgtgatatttccttcccccgtgttaggggtcggcaggcggcgcataacggattcgaaatccaagtgtagaggggcattctggacattgtttgaggtaataacgacctcattgaccgctgaatgacgtagcaccattggggagtctgtttgagatagcagagtgcgctgggcctccgcctgtagtccacgggtgaatctgggagtggttggtatcagactgtattgttttatggtgagtctgcgctcgggcgatctttggatgtggaagagaataaccatgttgactttgtagtcggaatttgagaaccaccaatatgcgtcggctcgtagttgggcttctgattcagaaagaccagtttcaataacgagcgaaggccagttattattgtcaaaaggatttcctgacggagtaagacactcgtcggcttctttatcgcatgttcttccgtgatatcgggtagccgagttcatagtgtaatcatccgaatcaattcccatttcgaataattttaggacgagtttgtttgaaaatgatcgcgtcactcgctcatgagctcctgatggtatgattcgaatgaccccttgctggtgctgtgtcgagtgtcaatctgtagggaacctcaagagggtttcgatctccagctattagctcctgcacttgctgggatatgtttgacacgatgataaactggttcgagtaagacgtgttggtgttgatttgatgatagacatcgttcgcagtttctcgaagggtagaaatggaaggagcagacaacaccacagcacccgggatctcgaatggcaggtgcgaataacagacacctgcttcctcgaccttgacctgcgaggttcgaggcgcaacatctgactcggtcctatcgagggacttcgagtcgacgtcctttgcagctaaggaggaggaaactgtggataatagcggagacagcatattggcgaaataggggtgtatagcgaaaggaagatgaggcagaagaagagaagtgagaaggctattaacaaagggggactggtagtgtcatcgttacattgaataccggtctttttaccggacacttatgtgacctaaaagtatgcattttgcttatcaatctgcgtacaaattgtgtaaattttgcttagagaatttactgctattgatttttacccgtacgctcgtcatacctggatttctgtcaagtagtacctatatatatcttagatgtactatcatgtggagacctttacttcaatctaaagatacaacatactccaatactacataacttaataccgatagtatcccttagccagtgtcagatagacagcctggaccccagagtagtgtttgtttgcacataaaagctgcctgggcgacctctctgtacgtctcatagcgacattgttaggctgcatgtcgaaaatttagacttgaactagaagttagttcacccaaaatcaatgtctgtcaggtaaaaacaactactgccctactacaaaattactgctcaaagatcaatctggctggcaaatggcccgtggacttcgctattttgtgtccctccccaagataaatacatccagagcggtgcggagatgtctctcgcacacacgaaccatcttttaatcaccaagcagagggggaagttttaaaagaaacccattgaaattgtcgaacaaaaatcatgcatcatccataacctagtacttcttgccctggcggaggacatcaccgaactcctccagagggctgcggatgagcttattctcggcccacaggttgggggtaaggaaaccgtaggtgttgacgacagcgacgaaggtggccttgagggtgttctcgagggtcttggtggagccggaagaggaggtgtaagcgtcctggacaccggcgagctggagcaaacgcttgacagcaggggaagcgacaaggccggtaccgcggggggcgggaatgagctgcagtcaattagaaaccatctcttcagatgtccggccccaaaaaggactagatcagatataaaccaccgtaggaaacttacacggacggagacggaaccacactttccactctgcttgacgggcagagagtggggctcaccaaggttggtaccccagtaaccgcgacggacggggaggacagcgagcttggcgatggtgatagcagcacggatggcggtagcgacttccttggaggtcttgattccgagaccgatgtggccctcggagtcaccgatgaggacaatggccttgaaacgggtacgctgaccggcacgggtctgcttctggacgggcttgatctgtaggttgaaattcacgttagtttctggactgatttcgatgtattcgttttccgtttgagctttcattgcgcaattgcgggcaattgtcgcattccagtcgagtcccgctcaatcctccaatttcaaaaagggtgtgtcgatccgtaccttcataacctcatccttgagcttgggcaggaagaagtcgacaatctggtactccttgacgggcagagagtggaggtagatctgctccatggaggtgatcttgccggccttgacgagacggccgagcttggtgacgggctgccactccttctcctcctgcttggggccacgacggccgcgacggccaccacggccacgtccacgctcaccaccacggtcgccgcgcgaaccgaaaccaccacgtccacggggagcagcgtcagccatattgatgttgttatgggaagcgacggggagggttgtcgggattgagttggtcgtcgagtttcacggcgctgagcactgtttgcccgaaatttgcgcgggtgggctaagcgagcgggcagccctagtggggaccctatgccctaaactcccgatcgggaatgtggcacgtgcacttaaggtttccagggcggtgtcacctgatggggcccagaagtaaatggattgatcgccgttgttgtagagaggcattgatcatgtagaatgagggatagatttgcttatggtgatgttgaggtcattagctatagaaatatttacaaatatatcgtgtttttcataccaatcgagtcccgcaatgttgttattctcactgctacgtcacaaaatttggtgcaggcggatgcatttcctatttgggcaatgcgacagggactccgcaatttcaagattgttcccccagttgcccccagttcaatagtatttcagcgtctttcgtctgctttttgttctttctttgcatccttctctgcttgttttgtcccttatagccatccaatcgcagttatgctacgctggtaagtctctcttactcatctccttcaatcgcagctcataacattcaaccaggtaccagtctaagttggcaaagcggcctatcctcaccgcaagcatcaccagtgctgtatgattctctcctttctcctttctctggaccagttcctgactcttgttacaacagttcctattcggtagcggggatgttctagcccagcaagctgttgaccgaaaaggtctccaagagcacgacttcgctcgtactgggcgaatggctctatacggtggaggtatgtctatatgtctcaagtgccttgtacattgctgatccgtgtcttttcagctgtcttcggtccggttgccactacctggtttggcatcctccagcgtcatgtcgttctcaaaggcactgcgtccaccaccgctgctcgtgttgccgccgaccaagtcttctttgcccccacccagctcacatgtttcctatcctcgatggctatcatggaaggcgctgatcctgtggaaaggttgaagactgcctttgttcccgcctacaaggccaacctgatggtctggccatttgtacagggcgtcaacttcacatttattccgctagagctgcgcttactctttgtcaacgttgtcagtttgggtgagtaatttgcttcgaggtgttgctgattatgctcctggctgcagtcactaacaactaaacagggtggaactgcttccttagcttgatgaacagcggggaggaattataattccgaggcataatttgagatacccttgatgtttttattgtcggctttctgcttttcacgtcggcgctccaatacgaaggatttttggttgggttattcggtctttgggcatcgtgttccggaattttattcttcaattttcggccatgtagaatcctggacagtataaatgagaataaaaatattcaaatgaataagaaatgaatcaaaatgatttgaagacaaaataagagcaaagtgaagatcggataactagttgggtgtgatagtgattatgttacggaagaacccaaagaggcaaggcaagtttttgtggctcgaacttcaaaacttccactctttgcagtcaattgtcgcccacctccactctcatctcacactgcctggagcagactattactgctaaatagatctaggcttggattcctgttaccttctttgtgtgaaaagctctgatttgcgctttccttaaaattctcgcccctccgactttccgaactcgatcgtcttcccctccacatccattcaccatggctgccgtcgcagaaaacggtactcccgctgtggccgatgagaactccgcccctgtcaccgagactcagactggtgatgccgttaccgtcttccacaaccccgatgacttcaacgtgaagcaccctcttatgcacgaatggactctgtggttcaccaagccccccagtggcaaagtaggagacaccagtgggatagatcgacgtcagcatgcttaccaatggaacctagggcgacaactggaacgacctgctcaaggaggtggtcactttcagctccgttgaagaattctggggcatctatgtatgtccaaccggacgtctccctcgatcgacaataacactaacctcgagcgctattagaacaacatcacgccgacctccgaactcggcctcaaggccgattaccacctcttcaagaagggcgtacggcccgagtgggaggacccccaaaacaagcacggtggaaagtggtcataccagttcaaggacaagcgctccgttcctattgacgaactctggctgcacgcgcagctggccgcgatcggcgagaccctcgagaatgacgatgacaacgaagtgatgggagtagttgtgaatgtgcgcaagggcttctaccgtgtcggtctatggacacgcacagtcggcaagagtatccagggagacaagcacacccgcacacaggcgcagggcaaggagattctcgaagcaattggccagcggttcaaggacgtgctgcggctcaacttggcggatgtggtggagttctccggccacactgacagtgcacacagcggcagcacgcgcgcgaaggccaagtacaccgtttaagagggctggctgagacggtgttgtgcagacgaggatgaaaaacgaaaaacaggggacggatggcgatgcgcagatttcacgattacggacgacacgaatcgaggggaattgactcgactcgatgtgcggtgccggaaactggggatgattcacatagggaccgaggtaccccccctttatgccggccccgctgcatagttctgcagggacgaactgattgcttgcgacttgtatcttactctaccaaacacattttacgaggcttatgccatgattaaggtcgaggtcgtgccagtatgatggtattttccctacattattctatacaaatatgacctgttcatggatgcattcaacttttggtgttgcgtgctaggtcgggtttcgcgagatcaagcccttgagtagagctgctgcttttggatggcacatgctgagaggtctatatcagtagatgtagctagaggtgtttgaccctcgtcgcatacgtctgtttcttgtctcttctgaccagtgtcgcgagtagaaggtcttttagggcttctaatggaacttcttggaatgcatggccaaagacactttagtactatgttgtatgctgcaggggtgctcaggggtgcagggcttcgaccatgttctgcggatttacaccgcatttacacgatcctctcgcaggacactgttgaaggactcatacactagcacacgaatattttctcattaatatcctcatcatgattagaccagaagacaggttttactcaggggaagttatttggcagacgggtgggcgtttgagacaggttgcactggaaaagggacaatattgttttcaatggcaaaggccaccccaaagtaggctgttgaagaaggccaaagattgcgtgcagtgaaagattgctcgggcagcttgaactaaaaccaaccatttgtcagatagcagaacatagtcacaaagcagaacacaaggcagaacacattatatctttgtgtaaatctcatacttatctaaaaatttgtcacccaacatccaagtcttttttgagtgacgaggctgtatacttgtgacattcaagacaggcaattggctctctatagggattataggtatatctcgctataggttgttaccctctcaagaggttatctaccaaacgctgggaggtattataggcaatgaataacaatggtagcaaagagaaggaggggagatggacgattggtctttgagagtgtggagtagataaatcatcagactaatatactggacgagcttgatatctactttccgaaccatctgggataacaagaccctcctgcgaaagaaaggtgaactgtcatgggatcgcatctccgggatcgaaaagtgtctcgacccctggctgataaaccatgaaggtttactggctaagacaactaacctcgtagactgttactacttcgacaacctatatggctagttggagagggctgaagctctctaaacaactggacagaagtcgtcatcgtcttatgcgaccgagacgttgccagcgcaactagctaactagctagacctcgatcattgtagagaatctatccttcttcatctctctcacttgttccaagaagattcaacaacccatgaatgcgcaaaattgatgaatctaccagaatcgcattacccactccttatgggagcggaaggacctgcctagaagggacagaacatcatacaacaaacgagaagggcaatcggcccatgcagaaaaccagaaaggtcccgcacccatcagaccagggtgttcaggaaatccacggaatcagcatcctcatcatcactgctttcggcgtcggtgtcgttagacggagcccaccagccgagagcgatcatcccggcacgcatacaccaatagtcgtcatccacacgacgacgcacagaccgaagccgctcgaagatatctagtacacactcctcatcgttcagtttgtacaccatgggccagtcgagaggagtctggtatatcgaagcgtcatactctggtccagaaagaggctttgcccactctgcagaaggaggaatcggaacctcttctccactcgccgacttcttcggccttttcgacggcttgcctgccgccacgggagtcgcaggagccgcacgtttcttcacggattcccgaggcgtctcgggaaggtgctcttcgccgtcgtcaggatgagcatcgctattatcgctatcgccagaaggagcaacagctcgctccttgcccttgcgacaaatctggtcttcggcaccaccctcttgtatctggacgcttaatagctctgctggatctggcgtagcctctgctggatctgacgtagcctctgctggatctggcgtagcctctgctggatctagcgtaacgataaagctgaggttcccacttgtcgttaattgctggcagtacacaggttgaccgttcgggtttattgatgagtcttcttcccgcttgattcttggccttccgctggcagcggcagcgatagagacgtgataaacctgcctgcgatgtttttgcatcgtttttacgctgcgacacgtaaattgacagttttcgacttgacagcagttaccacggtagaccggtaatccggggatcggccgggagtcaggggatggcgggacaaaaggattggtattgaagttccttccaaccttgactgcttcagcacaaattgccgtccgctgtgccaatgtacgggcagaagggtgttgtcggtgcttattggctagatggccgacaatggttttagcatccacggcagattcacaggtcttgcagattcagaactgataagtggggttataggtaaagaattccccaattaagttcatggtgatagtgcgactgtacgagtgaagaaaggagtaatattagactgaagaatagtaagatgcggttatctcgcgacacaacgcgacgcggataggtgaatacagaatatctatagactatagtagtaggtgaatactatctttattagctagtaaggcttagaagttagctctggtattattagccaagaaacgtacagaatacctgttgaaatgaccgaaccgtttgttacgagccaattcgattcagaagaaaagaaggtacaaggacatagtcgttccttcctcgtttggcaagtacaaagacgtgaccgttcctgcctcgtttggtaagtacgatccttcccagatcgtcacaccgttaacgactgagtgaactgggcatcgggccgaggatctacatgcgggattagggtgcatttgcaaaaggaatccatagtagtagggggaattgtaactagaatggcctcacgattgagagtctggagtatgggatatgtcctggctcagtatccggggccgaagaagagacaaaaagtgccttcaaagttatgttggggaaaataactgactattcagattgtggtgtatcccgtatcttagaatctaatatatggctgtggatccagactagggattgacctcatgtcatggagatggatgttctatccattaacactataaatccctgttactatcagccagttaaggacagtgaaatggtaaacatgctagtaagttgcctgttttgtttccttccttatccgaacttacagtagagtcgaacaccagggcagagaacgcgtctcattgctagcagaatatcacctcgtataggctagccaataggaaaaagttatttatagaggtaagcaagctgcttccgaaaaatccatgatcagcacaatgttctttattgatacatttccttgcaagttcctgctgggaatagtagaatcccctagcaggaatacccagaaacagtactccgtacctcaagatacaaccttcatatttcttcgattcatggatattctcaacacaaatatagttcgcctgaggtcagcactatatggatacaatccagcaagtcatggagatccactgagatgctctgagtggctggtggtgtcgcaatatcaaagttcccggagtaggtcctccgtactccgtagagccctggtcttggtcgagggccgacatcgcaagttgtcgggttgttctcatattggctcaacggcatagagtagtggtctaagatagttcgattggaaggtcgcaacggtatcagatagggcgtggaggattgcgataaagcgctttggcgacttgggcttggcaagtaagcgtgcgccactgggagagcacgcaactcaaccctgtcgagtggccatccagacgatataaatgtctagacgatcaactcgagcaaccgcataggatctttcgagactgagtttaacagaatttataaagtcattcgggacgccggcgattttgacgtgatataatcctgtgccggtgtcgggattgccaataggttgggtcttagtggaactctctcttaaggcgttggtcgcttggcgaacggctagaatcccccagggattgggaaataatgccgaatggtcgtgataagccctcctgttggtggatatgaagctcatctttgtccgcaagcgaagtcggagcccaaagagcatgtgctataactcttggtgttttcttggtgttatattatgagcgatgtcccagttgtggtctttgactctctctctctctcttttctcttttccttcctttccctccaaaaaaatgtccatatgatgagatgacctctattcctccaaggaagaccacacatgcgaatgaccaacactaactgaaatcttcccccttatctgctgaggtcttggcaagtcaccgggcacaaaccacagatccaccatcgttcaatgtttctacgcaactcttacgagagaataattaccccggaaaacagagaccagaccagaccagaccgaatgataggaacggcgggttctggtttctctcatcgcttggaatgtattcaacggcattggctattgctgtcttgacggggaaacgcatgccggggtaagcgggtatgaagctttgagacatacgaaactccacgggaagggggaaaagggccccaacgttacattggcaatcatctggtgattgtgattaatgcgatttattgatctcgcaatcaggaaatccgcgctcgacatcgcatatcccgaaagcggatgtgttttccggtcctgagtcgaaggcgctcaagccttgccaatatgcagcccatgcagcccatgcagttcaatattagcagtcgccatcggatttccaaatatatccttactgatttgtcgatttgatggcattgggaaggcgaaaacaaatcccagaatttgccctcgtggcaaatcccggaaccgtcctcaactgggaaattttcaacctcatcggcaatctccgactgcacatctcaacgtgattcgatgaaaaaaatacacaaagtggactcggcctcaccccttctagaaatccccaggatgccaaatgcaagaccagaccattcgctgctctgattgatccggacctgtatcaagagtccaccctatgctcggcctttaattgcttgactcgttcgtttccgtgtgcactgtctctgccgtgtggttacattcgcatgctcgtgggtcgacttgctcgagttcagccattcgccgtgggacgataaacatgccgatcgcatccacggtcgaactgcgaacaatggcccgtatgcgaccttctcggatgagccttagtggcatgggggcatgggggatggcgtgcaatttgctttttttcttctttttcctgcttttctcaagataagactctcctccggtcccacttggcctcatttgtcgagtgcacgaaaatttgcatatatagtattaatcacgccctttttttgtgcctctttctctactcccgattgtgattttttttctaggccctcttgaaagagaaggcatcatctggtctcgtagccatgtcgtccacagaccgtgagatggagacttctgcgtatgtatctgtgtggctggcaatttcatgaagggcaactaaccctctcttcagagctccaccctatgacaccgaagaggtcactcaccatgtcgtcctgaatgaaaaggctatggatgccgagttcgacaaggagaaccagactaccccggatggcggcgaacccacactctcggagaagatttccttgcgccatgtcgcagagaacctgcctctctccgcctggttggtggccgtcgtcgagctgtgcgagcgtttcacctactacggcatgtctggtctgttccagaactacgttcagcggcctcgggatggtagcgagggacgtggtgcgctcggtatggctcaccagggtgcaaccggtctcactaccttcttccagttctggtgttatgttaccccgatcgtcggtgccatcattgccgatcagtatcttggcaagtacaagaccattgtgctgttctgttttgtctacatgattggcctgctcatcctggtctgcacctccattcccactgccctggaccacggctcaggcatcggcggtttcattgtcgccatcttgatcattggtctgggtaccggtggcatcaagagtaatgtggctcctttgattgcggatcagtacaagcgcaagaagatggctatcaccaccaccaagaagggtgagcgcgtcgtcattgaccccgccctgacaattcagcgtatctacatgatcttctacggatgcatcaacctcggttcgctgtccctgctcgctactccctacatggagttgtacatcgacttctggccagcctatcttctctgtctctgtatgttcatggtcggtaccctggtgatcattctcggccgcaagttctacgtcgttcgcccaccccagggctccatcatcacggatgctttccgtgccgtctggatgatgatgaagaaccgcaacatggatgcccccaagccctcctggcagaccgaacacaatggtgcgtcctctgtccactgggacgaccacttcatcgacgagctgaagcgcgccttggtcgcctgccgcgtgttcgccttctacccgatctactgggtcgtctacggacaattctccggcaacttcgtcacccaagccggtcaaatggatggccacggcattcccaacgatctgatgcagaacttcgaccccatctccatcatcgttttcattcccattctcgaaacctgcgtctaccccctgatgcgccgtttgaagatccccttccgcccgatcacccgtatcgcccttggcttcgtcgtcgcctcgcttgctatgatgtacgccgctatcgtgcagcacctgatctacgacgccggtccatgctacggcaaacctttgtgcgcggcctccgaggtcaacggagaagcccaaggcaaccgagttcacatcgccatccaaaccccggcctacgtcttcatcggtctgtctgagattttcgcctctgtctccggtctcgagtacgcatacaccaaagcaccgcccagcatgaagtccttcgtgcagtccatgtacctcctcacgaacgcgttcggctccgctctcgccgaagcactcactcccgccgcctacgatcccgccgtcatgtggatgttcaccggtcttgcctgtgcatcctgcatatgcggtatcatcttcttcgccgtgttccaccacctgaatgcgcaggaagacgacatgaacgccctcgatgctgaagaagagatgcccgaggctccggttgaggcggcacggggccagtccaaggccgagtaggcattggcagtgtattttttgtgatatatttgtatttttcttgtttctttggcattggcattggcagcattgcaagtgtctcttatctcttacgctgggatcgtactttttttttcattgcttgcatcatcggagcgggaccctctgtgtgttctaaaactgctgtgcagattgtgagacgtggtatgatatgatgcattaatttagtatatacttattaagaatgaaaataatcagtatacttatcaattcactccatcttcaccgtacttccaaactccatgttcgtgggacagacctccacaatgacgaatatgacagacacactacggagtacagactactccgtatagaagtggattcgactccatctctgtgatgatcttctccgctcctttctgcgacacgccgtttcaattatctttcaagggtctgctcgcactgttaaagtgatttgggtaagagcttatccaaaccacccaaatcggaagtcaaagctcatgccagagcggtttctctttagtttggatatgtgatgtttctcagtcaaaacaagacatcagatttgcaaggctggagtgaccctcgactttcattgctctcaaatcttgagcatttggacatactcacttttcggaacgtcttttttgaagttgatctaagcctcatatgcccacctttgcacaacgccagatgacaatggcctcgcattcctatcccttggccattggccgaattccgtggcttctcctaaaatgcaaagcattctagagcattcaagctcttccatatcgacggcagagatggttcagctttgaaacgaaggactaaagctgttagtaccaagctatatgacagaacattgagcctctttttcatgcttctcttagcctcccaacgtctggcctccagttcagattccaggaattattgtggtgtccccatcctgtatgtgtatcgaatccaccagatcgagacaatatgctagtttgtggcattgaagggattttaaacatccacaaggtaaccttggaatggaatggcttagacagatgtctaccgaggtagatccacatatgagacccacactccctgacttcagaggctcaactgcctcgggagcacagccctggcggtcaactgcctgaatacaacaaccattaggtgaactctgtggctaagaatacccgaggcttacatgccgcagatgcatgaggggcgagacctgggaatcgttcgattatcatggcagatatgtcgggtgacacctaagaaggatgatacggttattgtttgagtatagacaagattcaaaacactaacggttagtccggggtgaagaaagtgagtgttggggatgaaaaggggacggagagttcttaggccgaaagaagaatagaccgggttaccgcattgggcaacctcatagccactcctccgtacgatagcccttatacggagtaaccatatgctgtatagatcaggcagctatactttgactttgctaaatgagatttagttgatgcctgacatgaggctgatcgaaccttctaaatgccctgattggccaagtttcacatcgatttttcagttcgtcttgtccctacgcatgctatttccgacttgtcgcccagactggattgttttcctattggaatagtccgcgttgcatacatatgtctttcatcaaggcggtacatcataatcatgacgtgcagactcccttgccacagaccgtcggacatgtaccaggtacatcatccagggtggatattacaaccaacgccaagtatccagtacttgatgaaaaaatatgccgctctcccccttcatcgaatcacacggatctgccatgtcttaaatagaacaggctcagccacacaggatgaaaggccaatctcggggactccaccgccaaattgcaaggaggctgtatccgtactaacgtaggaacggtgcactgtccactctgtagcagacggttaaaaatagggggaccccaaagaaaccactgtaaatgcgaagacctatgaaacccttgaaaccgtcgaaccccgttaaacccattgatcccttttaattcaccccaaattaatgcttaattctgctattcagcgcgactaacccccggatcttattggctttgctgcgctgacaccgccagcccttctgccgtaatttccacttctccccgtctcacccttccctcctacatctcccccctccccctactattattgttttgttccccagatctgagaacctgagaatctgcacatcatgagtgtgagtgaaccaatgtgtaccccattgattgcttgagtttgctttctgacgcgacttcccctagtaccagagcttaggggacacctcaggcggctatggccagtacaacccatacggaagtcagcaacagaccaatccctatgggggccaggaacaacaaagctatggatatggtggtggttatgaccaggctggcgccgcggaacagggaaatggtggctacggtatgctgacccgataatcgacctcttcgcgacgagtctaattcctcaacagagatgtccaacatcaatcaagcctcatctggtggcccaacggcgattctgaacaagtgcaaggaactgaacgagggtattaccgagttgaccaagaagcgcgagtcccaattggtcgccgcccaaaaggcccttctggactcaagcaccggcaaggaagaccaggcttcgcgccaaacgctcgattacattgaggatgagatcaatacagcgttgcgatacctgcgcgatcaattcaagcgcatcaaggagaccccgggatccggcgatgcgcgcgtacagggccaggttgagaacgtcagccgcaacttgcgtcgggagattgagcagtaccagcgcacgcagagcgacttccagaagcgcctggaggagcaagtgcgccgccgatacgagattgccaatcccgaggctacccccgaggagttagaacagggtgtgcagaatgttctgctgggacaggagcagagttttgttgtatgtttcgcccgaattgaatcttttacgggtcgggtcggttgctaatatttgaggaataggttcccggtactcgcacccgccaggccaacgatgcccgtcaggctactatgcagcgctccgccgctatccgaaaaatcgagcaggatctgatcgaactcagccacctgtacaatgaggtcgcagagctggtacaccagcaggagcctgcagtccagcagattcagcaaggagccgaggagacacaccgcaatgtcgagcaggccaacaccaagcttgacagcgctattcagagcgcaaagaacgctcggcgctggaagtggtacgcgctgatcatcatccgtaagtattacctgtcaagaccaagatctgatcgacccgctaacctactttccagtcattattattggtatcgtcgtcggtgtggccgtcggtgtcaccgaaaacaacaagagcaagtagcgggaaatagtgatttgtctgctgcactgcatcattttcctaccttgtccatgtacgacctgtcccgggatcttctccgcatcttcccatttgtctttgttctctcgttataccaccccttcgcatttccttcttgtgtaaaagcaatgtctttcaacccctctttctttgtgtctttgcctcctagctgtctgtacctgcgtgttcgtgtacagctgctccgcgtctaacacgcgatggcccttgatgattgtcgttatttcggggctcgtgatgttgcggcgcatggatgtatatactagattgttgctttcctccgccccctgtttggcgctagaacctatgtaatactgtctaataattgattccttcgcgcatgagtttgatctatcacgccgtagatataaccccgtagttgaaaagtcctggaatcctgggtttgtgcagtgtaatgtaatgcattccgagtcatcgtttgggggtatccgactcgacacgctctttcgaaataacgagcacctgaacgcccaatcattccgcgatctacgccttttccttcctctccttttcgcgctgctcctcagcgggtgtcttcgtcttcaactgcagtgcatgtagtccgccctcgcgagccatctcttccttgaacaacgaatagaccatacggtgccgagcgggctgcatcttcgactcgaaggaatcagagacaattgtcacactgagagatattagacattgactcatacgccgtgtatggtcggatgtggggaacgaacttgaaatgcgtctctttcgataccgacccttccattgcagcgtggtgcgcatggaggtgagagtcattccggatcacgagtttcgaaggtgtgaatgcatgggtgatctataaaaagggggggagaagttagcaatcgcagtcaacaacagtcaacaacacggaggagtggctcaccttatcgcgcatgacatcctctagcggcgtattggaggccatccttgcagatacagcgaagagacggcgagggagcagacccggaaggctgcgaggaagcatttagaggaaaagaagaagtgatcaaagggaggaggatgagagagatgtccgcaattgaagccaatcaaatgttttcgatttcggaacgtcactgtcatgacatcagcttgtctttttgctcgagacatctcaattgcttcttcttattcaatgggtttctactattaaagttcaaaatttcaaatttcaaaatgtctggtttactttccctgctttcgcgtacgaatgcgcgcgtctgcttcaccccgcggcgaatgcctctcagcgccagactcttgtcgactcttcccaacacacatatcttccgcgcactccagagccatgacccagaaagcctggccgtcgtgcatagcatctctgcccgatcattcacctacggtaatctaattgccgacaccgttctcgctaaggaggacctggaacaaaaggcccagggccaattggctggcgagcggatcgccttcatcgcggagagcagctatgattacgtcggtacttgctgccttgaatcccgttgaagaatatacgtagaatcctaataagcttacagtgatgatgctggcgatctttgctagtgatgccattgcgctcccgctctcgccggctttcccggttgcggagctgaagtatatcttggacaattcacaggctaagatgctgttgacaactcaaaaatatgccaataaaggcctggaagttgtggacaagggattggagcacgaccctgtgttctctatccgccgtaagctcacagagggcgcctcgagcagcgaagctgtaaccctacaagatttgaagcagccttcgtccggtgggttgatgttgtatacatctgggacaacgaaccgaccggtaagctcagttagttcctgcgcccaatgagctagctaactcggaacagaaaggtgtactcatcccccactcggcagtggccgcgcaggcatcttcactattagaagcatggaagtacacgtcggatgaccggctgcttcacttgcttcccctccaccacatccacggcgtggtaaacgcaatcgtggcgccaatagtagcaggctcctcggtcgagttcatgcaccccttcaatgcggaaaaagtctggaaacgactagcagcacccttcctcccatccaacagctcaagatcacccgtcacattcttaactgccgtcccaacaatctacacccgcctcatggccaccttcccggaactaaccccagagtaccaaaaagccgccaaagaaggaatctccccacaaaaccttcgcttgagtatctccggctcggccgccctaccaacaccgactaaagccgcctggacaaaactcagcaacggcaatgttctcctcgaacgattcggcatgaccgaaatcgggatggcgattagctgcggcctcgacgtcgcagaccgggtcgacggcagcgtcggctggccgctcccaggcgtcgaagcccgactcaccgacctcgaaacgggtgctgtcattccagtggaagacaagaattccaatggcccagaacgccaaggcgagatccagatccgcggtgaaacagtcttcgaccattactgggacaacgagaaagccacgcgcgagagtttcgttcagagcgatgatggaggccgaccgtggttctgcaccggcgatgtcgcgatccgtcgagttgttgacggagctggtagtggagcgagcggagattgggctcggggaccgatgtatttcatccaggggcggaagagtgttgatatcatcaagactgggggtgagaaggttagcgcgttggaggttgagagggagttgctttctctgtatgttgtcacattcctttcaggtgttcacttgaaagatctgtactaacgatggtgcttagtccccaaatcaccgaagctgcagttgttggtctcccatctgaacagtggggccagaagattgttgcggtggttgttctttctcccgacgcagctacttcgggtcataatggtcaaccctggggcccgctggatatgcggcgcgcgttgaaggattctcttgctcctttcaaaatcccgcatgagatgaaggttttggaagctattccgaggaatgcgatgggtaaggtcaataagaaggcactggtgaaagaggtgtttggtgcatgaaagtcgaacacactgtacaaattgagagcctacctaaacatatgtttgaggtaggtgatgtatatctacccggagaaaggatgtacaacgatctgcataatagaacattgaagatttaaatcatttgttatattggaaataaccgaaatcgcttgctcttaatcccaaattcatatcatcatatcaaggcctgtgcccggcaagataaaaaaccaaagagttccaaatatccacctagattctacggtgatcctcattctcaatgcgagtagcgctcgaatccacacgaggatcgagcttgttggcaatgctcgagctgtgaggaccagtggtaccagtggtagttccagtgctagaagtattgtagctactgccagcaacagcatcctgatgaccagtagtaccaagacccgatccaccaatcaccgagccaccgggagcggtagtatcgcgagtgtgggagccgtgggtaacagtaccaggcccagtaccagcaagaggagactggtgctgagggtagctgtcacggtccgagtcaacgcgggggtcgagcttattcgcaatgttggaactgtggggtccagcatttgtgctgctagtgccaggggtaggaatcggaccactgtgggtagcgccagttccagagcccagggtagagccgtgggtgcctgtagcggtgctggggtgagtagacccaagaccagcaccagtgccggtcaaaccagtgccatggatagtgtcagtacccagggcagagccatgtgtgccggtagcggtggtagggtgggtagacccaagaccggcaccggtgctatgggtagtgccagatcccagggcagagccgtgagtgccagaagcagtggtagggtgagtagatccaagaccggcgccggttccagtcacaccagaagtgccatgggtagtgccagatcccagggcagagccgtgagtgccagtagcggtggtagggtgagtagatccaagaccagtgccggtgaggccctcgtggcgagcacggttatcacggtcagagtcgacccggggatcggccttgttcgcgatgtttgagctatgagggccggcattggtgctgcctgtggtattgtgggtagatccaagaccagcacctgtgccagtcacatcggaggtgtcgtatgtagtaccagagccgtgggtgccagtagcagtggtagggtgactagacccaagaccggcaccggtgccagtcacaccagaggtgccatgggtggtgccagagcccagggtcgagccgtgagtgcctgttgcggtggtgccgtgggttgtgtcatgggttgttccaagaccagcgccagtcacatcggtatgggcagcacggttgtctgaggtagttattagtattgaattctgaaggatgagatgtcaggtgaggtgaatgacaaacctctatcactgtcgacgcgggggtcaagcttgttggccaagttggacgagtgaggtccatggttggaggactttgtcgactcgtgggactcgttcttcttgccagtaatggcctcttcagccttgcgtacaaactgcattttggtagtgatggtatttatgaaagttgaagttgattgaagttggttgaaggtgttatcaagtagatattaaatatggttgatgaaggtaagatatgaattgatctcattaggagaagaagagggtatttatatctcctttgtacatagacatactcaggcaaccattagagtaatgatttatgacgttcgtggtttcaatgtgatggtgtacaagcatcacgaatttaggtgcgacgatccacgatcctctatcggatacgatgtacatggatggatttcttatggagttcttattagctacatggtcagccacttaactcagtgtactgtcataagaatgttaaactggctatcatccttgatctaaacgccaaatatcaaaatccaaaacaattgcgtcatggttcaggctttgccaagaaatatgtatgccaactatatgcacctgggcagtacatatatgtacatacaattgtactcagcacatcctagtaatcctatagccaaccagaataaactggaatgatatcactgtggctaaagcatgtatttatcttgttcttatgtacaccgtagtctcatctttgttgtacgaccttgtactccggacttgtgatagggcgtggaagtcgaagcaaagaagacttgtaactttatttattcattattgaagtttgtagctagtggctcaattgacagatatgaaacatattcacaccgtactttctgtcaaagaatagtcgcagtggtgtagtcgcgtggctacgtcatcggaatttatgctaactagccacttcgggtatatctccgactagccgcaattctcaagagcttacttactgtcacctgatctatcactaactacaaaccaatttcaattaacgagaatggtagaatttcagtactcttttgactgtctttgtagatgttgtttcctcaatttaacaaaaaaagttagggaaaaacgacagatcaatagggtggaagattgaaattgcgaccagcggtggatatacccgaagtggctagttagcatagtccccggtcacatgactgggatatatggtctcttcatcagacaagtggcaataaccatgatattctgagaaaacgtccacgcgtccttcgtctgggatagtcgttcgacatggaatatgtgacacatgtctccttaatatcttaataccttaattcaggacctgcaaagacccaatcccgaagcccaacttagtgagattgaggaagcctacgacttggttattcggaccggtagtataaagctacactgatgagtgattcagtgggacctttttgagggtcagtcaagaagacctctagtcgttgatggcaaggttgcccaggtgctagacctcgctcttccaaggcccctgaaacaatcagttgagcgagataatcagggctgcagctctagtcattgcagtgcaaagtcaagatttatgggccttgctaggtgagatcacctctcaacgtagcatcgctgagaatatatcgacctagaatatttccaagcttcgccattcaacgattgcttaaatccctctagctgacgcattggtagaaccattgagaaaaattaccgaacaaatttccacagcttctggatgtacagtcgttgaaaacgcaagattacttcctgttcaatcgaaaatgaggttgaaaaaagctccgaatctgctgatgtcagcatccggtcgctccggtccgggtggacactccgagatataagctgttcgccatggagttacatacatggacagtctgaattcggtaattcggatctgtggggttgcatttctacgcccttggggatttgtactgccaggcgtagatccggcgttcccccccttgcttgcgatccttgaattttcacatgcgcgacaatttacatcgaaattgttcaaaggagtgtcccttgcaaacaatcataatacaagctcttcccagacaacacagtctttccgcctgaagatcccaccccacgggtcgcgtaacaagccatgtggattgtctcgttctggatattccccttggtatccgggtgcatgtggattggtgagagtcagaacacgagggaataagcttacctgaactaatggccttgtagctatgctggtagccatgttgtcaacctgggcggcggatggaaagccaatttattccaccatgaccgatgggctcaaaattccgtgagtctaatcaatgaaccttggccctcggcgcaacatcgaagttaattcaacaatcagttacatttcccatattggggctgagagactcaaaccgctgttcattgcgggaagtgcagtaacagtcgtattcatggatctcggtctcatctctgagcgttggcttcgtcatgccggccaacttgcccgaaacaaagggaggtttgacaagatctgtgctgttggatcgattcttttctcgatcgctggggctgtaggtctcattctgctgtccatattcgacaccaagcatcactcaaaccttcacgacgggtttttagctatgttcatagcatgctacgtggtctgcgccctcctggtatgtatggaatacatccaaatcggccgattctaccatccgcaagcccggattttgttagtgagctttttcatcaaagctcttttcatcatctgtgaagttgctgtcgctattggatttggcgtatgcaaaagagccggaagaaacaggaacgcagctgctgttttagaatggggtaagttttcagccctgtcagattgtgcaaggaaaagctaacttcagtagttgccgctcttatattcgcattctttgttttttctttcatcattgatctcctgccgtccgttcgtaccaagagacacgttccccagggtgaaaagtatactcggccggatgtggagaatcgaccagttgacttttaagtcgcgagtacagtctgacagcatataataattattccatagatactcgtggatgtcagaatggcttttgccaatgagagaccagttttgactttggccacatgtggtgatatcatccctggggaaagggtgaaaaccccgaatctctcgaaaaggaactctgaacacttcacactaattcaagcaatcaataaattaatacctgatcatcaacatgggcttcttcaaccacctctgtggtttaatctcaaccatcgctcatatcatccaatgcatcagttcatttgtcgtcctcgggatcacagcctgggcagcccgcgagacgaaaacccttacggtgatatttcccttggtggtggtatatttccccaaggtcttatcttaatatgtagagattctaaaatccttccaggcggtcctcaccccaatcctcgacggtataacactaggcatcagctgctttacccgacgtcgcagatggcaggttctccctctgcttctgacggacgcagcactttcttacctgtaagcatgatagtattaagcactcttttataccggtaacaaatgctctcccatttagctggctcactgcatttatctttctggctcaggatttcaaccaggtcagctgcagcatccacctttggaaccacgagatggtatgtagccggaagtatgcggccgaggcattcagtttcattgcattgtaagtgacgttcttttgacgatcaatccactcgctgatcgcacggcagctttactacattcggagctatgacatccgaggttttgtatgcatacctgccgaagaaagataccccaattcaggaaaggaaagatggggcgacgaacctggagcataatctccagggtgccggattaatgaacccttgaacagaaagtacctgtgaatgctgaataacgatgtccaaggcatgaaatccttcaattatataaagattggcgatgcctataggagatgtatatgatacagtattgtacaagtcacccaaactcaagcccactcacccttcctctcgaacggcttcacaaaactagtcgcctccatagtcacctgtagagaggccatatcgacagccgtgatatgagcttcgaccgtgcagaagatatccagcttatctttatctgggaaatccggagggatggtgacggagcagttcacgccaagactggtgatgacgccggaatactcctcgtccaaatgtctaggcctggtacgcggggtgcgtagcagacatgggaatgtgacggggagattgcactcggagaagtagaatgcacggaagaggagcatgcaagcccaatgttgtgcggagtatttgtcgaggtttctgagacgtgtgcgcaggggttgagagtagataaggtgagcgtcgatgtcagatttggagaaggggaggagagagatgggaatggtgtttgtgtcattggtggtgatttcagtaggagtctctgctagatcggcttttgctagatcggtctctgctgggtccgtctctgctaggtccgtctccactagatcgatctctgtagaatctggactatcaacaagagcgtcaaactgacggccgtgttcatgctcgaaacgcaatgctgcctcgatctggtaatgcgcaataacatccgtgtaccggcgcagcggactggtgctcttgacgtacgtatccaagcccagggtgtgatgcttagttgggactgtagaggagtaggccaacggtacgctgagctcatagaaaccctcaccgccgaaattggacaagtttttgttggtcacgcgtccgtactccgggtcgtaccacgtgccgtcgtagacaacggggatgttgcgtgcggcacagaattcaccggagatgtgcccggccaggttcatgatcagggagactagattgtcccgggattggtcgcgaacgtcgtatggatcataggattgcacatcgagccggatgactgggtcaccgagatagtggcgtccggttgtggattgtaaatcgtatggcggcatcggggcgtcgcctgactggactgagatagaaagatctgggctaagaggagtgaggtccatggcaccattctttcgacgggtctggcggaatgcgagcatgagttgacgcatgatgtggaatctatctttgtcctcgggccgcaggccttgttggatagttttaccctcaggtattgatggttcggtgaacttgccaccgatggtgaatgattccgactgttcttcagaatcggggtcgaagaagtcgcgcagtgttttgtgagtgatgttgatgacattgtgaattgtgccgtttttgatttcactatccaagatctctcctcgaagattcatcttcgcactgaatgtgagtaccggccgaccagctgccaaactgaagtggggttcagtgagagctttgggaagcatgggataggtgcgttccgggatgtaggtggtgaagagtcgagaagctgcatactgaatgatagggttgtcatttttaataaaggctgtcggattggcaacgtggacatgcacccagaaagtgttacgagatcctggcacgggctccagcgatataccgtcatcaatttcctgcgccgtcacatcatccacacagtaaactaggagatctccccaatcctttctcagatgttgcatggaatcctgcaactggtcggcagtgagcttgctgcaagattcctcaatctcttcccactccatgtcccttgcgagggatatcccatgtccaggaagcatcagatactggtcaaggggtaaaaggttctcccaaggcgctatgatgccgatctcctgcaataaaagacgggttgaagcctcactcagaccaagagtattatacatcccggtggcacgcatgatatgtgttgctgttgatctcagagtgcccgatggcatgacaatggaagggaccgagtacagctgcagatattcaatgatcatttggtcatctgcagtaaatttctcggtaggaagttctcggaacactagcgggtttccatcctgaccaggcgaatacctgttggaggatggtcccacgctggacataatagtcggagagcggagccttctgctaaggcgaatcaaccgctgtgctttagtgatgaaccggttcatagggtggtctttagatccctgcgtgtctttgcgcattgtggcacgaacacaatgttcttggtgttcatgagtccagtcaacgacctgtttgacaatattggcgatccgttttggctgcacgatatacatccggctgaacaaggagctgccatctttttcgatgagaaaaggatgccggcgaacagcttgatggacagcaaacatgttgacactagtcagctccgattcctcaatgccaagagcagttgttgtcaaattttcaaggctcaagcatagaacttcggtatcgtctgccaccttatcatgaagatcatccagtatctgggaattttctctatagaatttcaaaacatgagtcttgaagttgctcatcatcctcagaagaggagcgcccagtggccttggaagacctccctcgggggtcagttgaatatcttgacatgcgatagcctcgttatccgggaaccatggcgtgaggggctcgacaagttcggtaggtgcaaatcctttgataacatagtcgagctccgtgttggagcaaatgcgccaattcccgttgccattgtagaactgtttctgtttgtgaacagaccgcacgtagattccgtaattgaacaccccgtccgcgttcaaccgggcgattaaatcgccctgttcgaggtgttcaccttcaaattcatctttgtccatagcctcttggttaaacctgttcgggtcaccccaagcatcgattatgtctcggccgttaggcattgtgccaatcgatttaccaggtatttccaatggccgattcttggagtcggatcggcgcaccgggtccaaatcattggggttgctatcctgccatttcttcaggtactctcgaatgtctccatgtaattcgaattgggaccgaaggaggatattgccatcgataggaactcttgggggcggctcgtctggatcagctgttttctgctgggatagaagaaagattagcggtgaatagcaaaatcttctttagtatgacacacttcactactggttggaacagcctcagctgaccccaatgttctcgtggtggacgaaaagcgtcgccccccagacaacaccggaagatgagtggcggatgcgatcgacgcacattctacgcggttgtgtcgccatgtgcagagcacaggtgacaaatttgcaccagtcagcttctgcaaagcccttattcttgtaagtgccattgccagagcttgcgcataatgaatgcgccggtggctcgaaaactaagtatattatgccggcagttgctataccgccataggcggtatagaaattgtcccgtgattttggtcgaccaatcacattgcaacatagaagtatagaattctgtttataccaaagaagctcactggatgaatagtctcatagttagattatttagattgagttgtagctagtaagaacacatcgatatcaatcgatggcacgcattctctctaggccataaaatacaaactataatctcacagataggccatcgcatagacagtagctcccgaggacatctaatgagtacccttccttgtgtcttaaagtctgtggtagacattctgcccggttccaattcttgtcacaatgcaataatccacaaaaacaatgccaactagtagaatgctgtgggtatacctagtacatcttcaaaccactggtcatttcccaaatccattgactgcatccaggccatctgatctagatctggaatatggtgattgcgactagtcatgtcagagtcagcactttggcatggcctggtccccacatcttgtagctgagaagccatggtccatcgagcttcagcccacagccgacatttggtcaaaagcttaaataagagcttgagaaaatgatcattgcactgaagttccggctctttgctacttagatcgagcttatggagcatacagtccatcgttgatatcaggtcgactgtattccgcaccgcttggcaatcccattgtgggtcttcaagtgttgatagatatttcaaaagtgtgatactcagaatcatctgtgaccaaaagtgaaagggctggccgaaaattttcgagcaaggaattctgtagaactcgtccaaccacgatttgatattctcgaccgactgccacaaacactcgagtcgttggaattccagtaccaccccgccgtcactaattcgtccagattgatctaaagcaagcgagtcttgacttatcgaataacctagttgatttatgtataattcgacgtattgagcgtgtgtattgaggatgtctgcgggctaagcctgggtttccccaggcgaaggtatcagcaaccacaggggagacaatctgctaggttattcacgcgggaaaccacttacctatatggtagagatctgggggaaatgaagatttaagtcatgcagctgtgttcgtaaagtcttgagatagaagaaacgaggagctgaggccgctgcaggagctgttcctgtacgagtaccacctatctcgtcctgttgtcgaacataatccgctttttgctttaacagctgcaagtgtacttgaaagacaaataattcatccgcagggcatgacttggttagtgtgatgacccgaagcgcctcttccatctgaggcgtccatcgtatagcgtcttgacgaccgagatgtgacgaaacactaggattagtcatagtttgttagtatgtgttgaccgtaagaggatcacaatgattatgcgcacttggagctcaaaataaaacacgctagtaatgccctctgtctttccaaaaagccgtcaggcaattgatcgttagggctgtgaggttcttcagcctgcccttgggtaagagacataatggctttcacgtctggagaggatggtttgaacaaccgcaaatcatatactattgaaatggcgagcatcattaggcgagagacaagatccgctctgccaagaaaggcgtcggtactccatgctaggtaagtcagtaatccaaggagcaagtcgatattagactggacttcgcgcaaagcagacgtgaataggatacgcttcagctcctcaatttgacccagtctttcttgcgtcgagaatatggtaacagtgtggatggcttgaagtaagaaaggcctgttttggcgcagatacgagtttgtcatgtctggggtaaaatcgatgaaaggaaaacatggcagcattcgggaccggaagaaatcgagacgctcatcttcttgggtcagattcggtggtgttgtgacgatcgagtccgtcgcaaacgtcggcccctcactgatattcagcccagcgctggtgtttaccaaggttccattcgaatgagacgtggatgatgaaataatgtttccgtcgagggagagagctggttgaagtggctcaggtacattggcggaagtccccgaagccccctgggaaacaaatgactgcattgcagataataatatctccatcttgtcttccagccgagcgatgcgcgaatcagacgatccggctgcctgagcattgcgtctgcgaaccgactctgatggctgacaccttttcttgagacggagacatctgagagaatcattagctgaatatcatctgattaacaggccggtagtcattgtgacctttcacacttatcgccgtttggggtacgcacacatcggctctttgccttatagcaatgcgtgcaagcttggccatatgtgctagattgactgagagccaggtttgatctctccatgttgcctggacaagctatgctagaagacaaagtaggtgaacaggattccaagacactttcttgttcaaacggaactccgccggtaactccgtctcaagcggatttggccccgaagtccgcaacccgggcgtaacaaattgttgaatgagtagtataatattagatgttctataagagtatactctcaagttctatccttaatggaggggacatgaaacagctcttgtgagctcacaagagtaccggttataccaaatcgactacggagtgctgcatcggtagaatcgacgtcaagaggcagccttagtagaacaagcattggataaaaaatgctcatttaatattggtgtctcactcgcaagggcttcattaaaaaagaaattcttgttccaccaagccggtcaaccagatttatagatctttagaagcgtctaggtcgttcctcactggtgaaatatcgacagcagagtcgtgccagtaatagattcttctcgtttcggtgtcgcgtaaagattccccgatatatcgacagctgtcggtcaacaagaataagcgtaccatcttcgctaacccctacccttgttcgtgcccaattcgccatccctgtcctttcaaggaggtgatgcgccaagccacgattgtcaatcaactatgcgttgctgacatctatcggagacgcggccgaatattacctatcatattagcaaaaaggcgatattagccccaccgaaagtgcgtctgctcatcaagatcatcatgattattgccaaggagtactctgcacgaagtacagtctttcgattatggttgcaggatcagtcaaactgccatctgattgtaagggatgtgtcattcatatctaaaaatcgtgcatagtcgtgctctcgcctgcatactccgttttccgtatgccattctccacgtaacggcatcagattctacattccagactcatctacggactacccgagaataaacttattcctcctatattgcatgtcatataccaagatctagtggtccccgagactcaagctacgaactatctcattcccggtgaactcctccgaagctgggttgccacttttcaagacatgggatgaggatacaccggtaatttgactcgtgcgttaatccatgctcttgattcagcctatcaaaccgcgttctctgcgcggattcgtacatggatctatagttattgagctatacctccctaccctgctctctcgcccggaagcaccaatgcccgacctctccaacctcgtaaacatgccactttcagcataagcccggcgatcctaatcccccaagatatcgtattatttttcctctgaccgaaaagatcgccaaagatcgcgaattggccgggggaaaacgtattcgttgtcgccaaccccgtccaccttcatatgagtcaaatatgattattaacagagctttcttgtcacgagtatcatttcttgattgtattaagcgagacctgacacaagatcgatcgggattcagcatgccagggccaggggcaatccccgcgagttttggcgggttccacttttggatcttttgtctcgcttgatcttgaggattaatttttgttttctcgattgtgtgaataacgccaaccgattatgtacttttttcaatctgttatggctgattgggtgatgccactactgccgaccagtgaagccccgttcgttgcccaagatggtacggaatacctgtttcgacaaagccaaactctcagggtgatctgccgatcactagggccgagaattggacaattgcttcccacatgcaagtttagccgacgacaaggaatttgccttgggacccactgctgcaggtcctggccctatctggcatctggcataagcatatgtcaagatcgggagatggaggtattcgggtatacgaagagcgtagaaacaattgactcggacgacagagcatccgtacccctgccatgtccttccactccgcagctgcagctgcagcctccaagcacagtggggaactcatcacaacattcaatttatgagctctttcgggtcgataagcaggggcacctgctcaatctagactcgcatggccgactccggtctgaatggaatggaatctctcaacaatgcttctgccgagcattcttctcttggattttgtggcttggtttctgttcctgttgggtccaccattcaagaggggtgtggtcagtggcttcaataatatcctccaattatggatgctcccaagccaaagctatcgagaggttatataaactaaatcccgtggaactgatctagagggtgtatataggttaggttctcggtcgtcatccgttccagtcccctgcttgattaatattcctttcttctatttattcctacaataccatatttgctatattgtctactctcctttgacaacatgctctcaagcaacagatggcacgttttggcgctgttcctagctcttgtccctcggacaatggcagatatctgcgcgacactcaaggccgggggcattgatatcgaagaccgtatctcattggcctacaacaccgacctgaccgagtattggtccgcggcatgcggcgatctcaagccaacatgtattgcagctccatccagtgcagcggagatggcgcaggtaatcaagaacctgaacgacgtggatactctcttgtttgttctctccttgcaccaacagtaaagatgtccgctaaccctaaacagtgccatcaagagcggaggccataatcccaacaatggattttctagtatccaggacggattgctggtttcgactaagaatctagatcaggttgactataaccccacagatcagactgttgttatcggtcctgggctttcatgggaagaagcccagaagggtctcgcgggaactggtcgggctattgttggaggtcgaatgggaggagttggggtcggtggatatatgctcggaggtatgtggatcagaaatcaacaccgactctatctccaatgatttgtaggcggtatgagtttcttgagcacccaatacggctgggctgcgaacaatgtcaaggacttcgaagttgtcctggccaatggcactattgttcacgcaactgaaaccgaaaacccaggtgggtgacactatactccgtatcaacgccgaaacactaacgcttgatagacctcttcaaaagcttgaaaggaggcggcaacaacttcggtgttgttactgcatacaccgtgcagacacatcctcaagaccataaggtctggggtggcaattatgtttacacatccgacaaagccgccgatattctcacagtagtgcgcaacttcaccgacgagtatcccgatgacaaggcggcaataatcctgacattcgagcgtggtctcgtagttgacctgtgtatcttgtttctcttttacgacggccctgagcccccctccggagtcttcgacggcttcactgctattgaacacacctcaaccgccaaaacctgggatacttactacgacctgctcaagaacaacgacttcttcattcttaagtaagacgagcagcttcaatacttggattgttcgctaaatccctactagggggcaacgctataacatcgctaccgagaccacgcctcttcctaataagaccgtgggagcagccccgctccaggagtactatgagcatttccgcgacgttaccgggtccgtactaggagtaaccgggataataggcacagtttccttccagcccatgcccaagacattttcccaaaaggctaaggaccggggtggagtacgaattttattcctaatggaagaacaaggacgatcatatcactgacaaatccctaggacctcctcgatattccctccgatcaaccgtacattatcctggaacttgacttctcctacgggctatccaccgacgacagtaaggtcgacgcagccacggtcgaactctatcagggaatggacaacctggcccagaagaacatcgataacggccttcttcccgacgtgtatcgaccattgtttatgaacgacgcatactaccgccaggattactggggccgtattagccccgagtccaaggcgcttgctctgaagacgaggaaggcgtatgatccccaggaattcttccagaagcggacgagtggaggctggaggctgaaggactagacgtcaagactgtctgggcctaggcatattggatatatttatctcgtctataattgtatttacaaagactaagtcaatcaattggttttaattatgactcaagagaaacgtgttggggagtagatgcatgagctctacatgatatattctggtacggggtatacttcccgtggctcaatactaaaaaccctaccaagcagctccaatcggaaaataaacacagtaaggctagatgcattgccctgaaacttgatctactgtgcattttccatcctagtcaataattagatcaaatgtaggcgcctgcttcagatccggagacgcccagggaacgagtggctgagagcgacccgcggcgagttagggtttcctcccaagcgccagggtggattcgtcaatcggacctatattgtatcttatattataattataattatccttccaatggggtattgtctttagcaaagagctatgggatctcctgctaccttaagctactatccatgccgatcgctatatccggtagagggctcaatgaaagacaagtcacccaattgagtacggcgcttctccaatatgtaacacacaaagacacagcctggcttagagagattctagatctgttgctaatttaatctggtctagacttcggacaattgatgtcattgggagacctttgttgatgtttataaaaagccggaaccagcctgttcttcaatctaacaatcagcttcactttctcttcactttctttcagagtacacttcccttgttcttgagcctttcgtttcatacatatctacctcgtcgttgcttgcttgaatactatcccactcatccgactctcgatacatcggcgaatacacaatcagcccggccaattctccaattccattcattattctaatcagcccattcaaaccaatttcaacccccaagatgtctccccgatacggtgccctcggcgcaactttccaattatcccgcctcttccaagtctgctccctaattgccataatcggcatgacagcaaatttcatcagtgtgatagtaaacaacaatgccacacccccaaatatcctaatcggaacgatcagtgtggtaagtctaacctcgtctacactctaaaccctctctagaaattcactaacaaccaacccacagacctgcatcgcagcaatctactgcataatcaccgcgatcctctacacagacgacatcctcccgttcctagcctgtgccgtgctagacactctgctgctaatcgcactgattgtcgtcactgttatcgtcggcaaaccactctcgtacctgaagtgtacgacgctagcggagctgggagataaggatgctacgttgtatgcatttgcgtcgagactttcgagttacattgctagtgttagtgggaagattgattatgtttcgtggattggggcttcaaaggcgatttgcattgagacgaaggctatttgggggttgagtattggactttggtgagttttgtttcttcttcttcctgagtttctatttattttggccgttgttggagctttgctgactttggattggtgttgtagtattctctttttcttctctgttatttgcaatgtctgtttgtggctacagaagaagaaggctcttgcggtgaagagtatggagtaatgaatggctaggatttggaggcgacgctggaaaatgatatatacggatctatctgtgaggttctgagatgatgacagaaatatagtacgacggaaggaggtaacaataacattcaattttgctggtgctgcgacggtgctgcagcactatataacagtaagtatttcaagctaccaacggaggtactcgtagaattaaatgtggatggcatgtccagtaatgaagtttgtcatattgtatattcggttctctttcttttttctttctttttcgccttcacggaacgagggcgatacaaataatgagggggtgtatcgattccggttgctttcaccaaagtctcctctgggtggagccccaatcattctcccatgatcgccactctaccccgagggctgatagatagacggataaatagccttcttctcgagggaatacatgggaaaccgttctgccaactttgctatatgcctagaagcaaaagtcttgcatctatcccgaactcacaggcggaataacagccacttcgcccccagcctgtataacaacctccctatcttcctcgacatcaacatactccccgttcagactaacaccacaagtagacaggaccttgtgaacaattccagggtatcgctgttccaattcgccaaacaaagcggacagtttcaggggcgcggggagcgattctgtatttttggaggtgtattgggatgctgttgcgaagtagtggattgtgaatgttttcgacatggttgagggagcgaattgactgaaatgacagtgggagaggttatgattgagagtgaaaggtgttgaagaggtcagttggataggcagataagagatggatgaccaatgatctgcccaatgcggggtaactaaatcacactcaatctataagaaccagtcatgcattctatgaagttcatactacatctaaatctccaaatctatctacttcgcaagctcacgaaatgccctcgccaaatcggccttcaaatcctcccaattctccaatccaatgctgatcctcaacaacctccgatcaaccgtcgcatccgtcatggtcctccactcaataagcgtctcaacaccacccagactagtagcatgctggaagaaatgcaatttactcggtaattcacgagcaaagcgcatctccttcataataatagaaaaaacaggcccgaacccattaggcatctgcttcttcaaccaatcgccctcaactttctgtagactggcatggaggacctcaccgagaacagcctgcacagccgcctcgtcgctgtcaggcgcgggattaggcgcatgaagagcagcatcaagccaggaaataagacgggcggcattctcactctgacgctggacgcgtacctccaatgtgcgcagacttcgaacgccaagccacccctccatgctacccatgacagttccgataaagagacggtcggatttgagctgtgcggcccagtcgtcacggttcgtggcgaggacaccgcacaacatatcactgtggccgccgaagtacttggtgcctgagtgcatgacaatatccgcaccgaactggaatggctcttggaggcctggtggggcgaaggtgctgtcgacaataaggtatgcgccacgggcgtgggctttagcggcgtaggaggcaatgtcgaaggcggtaccttgggggttgaccggtgtttcgaggaggattacgtcacctttctcgagttggtcgggttggcagtcgagggggagtttttggagacctgttaggcgggtgaagagggcgatgacgccatggcagccgtggtaaccatcgccgacggagatacggtgggggttgaggagggtgagggcaccgtgcagggctgataggccggagctgtagcttataacttggccgtatagcagggaggacaggattgtttcgaagcgagtagtatttggtgcggacatgcgcgagtagatgtgggaggttggatcaaagtcggactacattggatatgtgttaggcgatgagatatagaacagcgagtcaacgtgcatacaggagtggcatcagcagccggtactagctgggttggatcattggaataccgaaatgtagtagagagatgcataggaggagcaacatcagtaacgaggttcaaggcatcatcagcatgcaaggagcgcgtggaggcgccaatggcttcgctagaatgggacatgataaaagatgctatgtttggttcttgaattgtatgcacagaaaaagggttcgtcaagcaaagttataatacaccgatctcgggggcgggtgggggaagagggggaaatcacgtaatggatcacgtgttggagaaatcacggggagaaagaacaagagaggtgtggaacacatggattatcgacggatggagcccatgcgggatggttctcgcactgatccaggaagagctgccttgaaggttgcgcgtgctatcgaacaaagttagcgaaagaatagtacaagccagagacacaactcaccagcctctgtatcgaacgcaatggcgaggtcgtcgtgttcgatgggatactcaggcatgtcgaggcacacaaagttggaagctgggttatcatccttcttaggcagtgcgaacttggcatctaccatacggattccgaacttgccggaccgggtgaaggactgcatgatatcagtacccttaagaacaaagttcatacaagttccatggtggaagtccccaaagaaagcaagcatttgaatgactttctcttgtcgaacgatctgaattcgtgccagggaagcttcccatttcttgtaaatcggaaccatactccgtcggcgggagatggtgaacgatgtagccatactagtttggtcagcaaaatcccaaccaaagggctagatggaactcacccatcataaagcacctggaagccagtaacagctgcctcgaaagcatgaagatctagaatagaattagcaaaagcagacagaaatgtcagaagtagacataccttgcatggtggggaagtccaaccggcggatcgtaggctttgtcttaatcttctcaaggaagccggttaattgccctggcagttcagggcgaatgaggttatccgcaagggaaagggtcaggtcctgctgccctgagcggaacaagctcatgctcgtcttgctctggacatccaaaccaattttgagttcgccaggtcctagatagaattagcaattcatttcggagcgaggagatagagagagcccacctaggttgatacgatccgtcacagagccccattcagtggcgacgaaggccctcaaatgttccgataggatcgtcggtccataaccatggtcgacgtaagcatgctcctgatcaaggacagatacgcttcccgcggggaactgaaggtatttgaccgcgggctgaccggtgaatggatcttcgggctgctcaatgcaataagactggatggcgaattcgggcgacttgatctctccctcttgtggaagcatgccgagtagcacagagtgcattttcgaacgctcagccgcctcgtggaaagtcatcaacatagatctcgtacggccgtcctcggtcactttgaggagaagagcgggagcaccgtcttctccccgcaagagaccgaacactatcggtgagccgttgccaaaaatatggcgaatgctgctcagagtcttgacctttgggctggtcaggatagctattcggaatccccgatgcgcattgcgagtaccagtgccttctgtcaccgtgacagatcgctcgaacaaacggactcgacatctttctgtagggtctggagggaacgcctttggtgtgccgggatccatatattggaaaattttgatagtattctcaaataccacagtctcacctgcctctgggtggagactgttctctgacttctgggtgtatttgacgatattccaaagagtcttgaaatcgtcttccttgaacaggacatccaactcgaatcctcggggaagcttgactcgcatagaatgggaccggacttgccattccacatcctcccaagtcggaccctgcttgcgatcggactgtatcaaaatgttgacaagttgactttggctagtgatggccgcaaagacataccaatccgctcgttcgcgtacgatggtcaatgcgcagggcatggcatattgctgttgcccatcatcatcactggagctgacacagacctgcacgaacatgctaccatagctgaagtatcggcttgtgtcacccaaaggcatcatatggaccaaacttggtgtcttgcctgcattatctaccagcattgatctcgtcgccgcaccagataagactgctgaaacatcgggcgcatagaaggggtaacgcagccagatactagtatccagctggctgggagagccttcctccgagttaatcacggcgaggatgttgtttcgtttgatggacatggacagcgaccggagatgatttatcagagtgtgatgtatactcaaaagatcagccaaatccttgtcgccggtggtactcgcaacggccagtagggcgtcaacacccatagcaccgtatcgagagagttcatgatgactgggcacaatattttcatttatccataatgcctttccaagatcgaccacagcttgcttggcgtaggtaggtggcagtgtcgaacgggatcgggcatacgcttccaaccgtgtctttcctcgtaaaaaccaccagaccgcagcccgaatccattctgctagcgatgtttctaccaatggcttaacctcctctgctgcgagttcgatagaactctggtattgtgtattgtactctttgaattcagaaaacgcggtattgccaacttggttcgcaatattgcgaagagaaaacttggggggttggacgctatgtggtggtggctcttggccctcgcgactggggggtgacgcccggtttgatgcagataggtcttggggtggcgctttggcctgtattggtgaaagcttgccggggctacctgggatgagattcgtaggcattcgtgggtcaatggggctgagactcgctggtgcgcgttctgctgaggggcttggggggcttcggatcgaatcgacaatagatctcatcgacagagaaattgatggcgcatgcggaagtcccgccgttggggctgcttcgtggggcgatccagaattgtaaccttttatgagaggttccgggctaggaggactggggggactagggggagttgagatatcatcgtcttcaactccaggagacaatgcatcttcctcatagcgatgatgcagtgcgcgaccttcttccgcttgcatcttatcgcggacgcgttgtgcgaactcggtatcgccgtggagtttcaatcgagcgccgccgtcgcccgcagacaacgtgctcaggaagtcagcatcctgtggattttgcattagcagaggtttccagtccaatctatcacgctgaggcgaacaaacctcttttcgggatcgcgcatcactatctcccagcgatgtgtcaagtcggagatttggcagttgcggacgcgaaaggtccgaccccggggttcccctgctgtccgacctctcacgggcccgcgaaatctcgattgttggcgattccgtctcatcgcctccttcaccaatcacttctgggttttgacggctgaaacccacccgcagccctttgcccttgcgcccaccatgcttggcagaggctggagaggggttggggacagtctgaaattggtctgagaaattgaaagaggcataattatcaagaggcaagactggcgctgacgccgacgccgacgccggcgcaggcactggcttggcgggagggtgtttggagatgtcttgtgaggaaggaaagcggtgggcagcgacggtttgcggagttggatcgataggcgggggggctgcggctgattctggggcacgagagctcaaaaagtctgcgatttcttgatgctgttgcaacgcagccttatgcttatccttggagaacagtttacttttccaatggggctttttcgcgggtttggcctgctccgcgggcagaaaggagaacgggtcatcggcagacatgacaggaaagatagcgagtagacacagtccacatcgcactcaataacacacagacacacacaccaaggatacccgttgtgaaatatcccctccccctgtgtgttgaaggatcgacaggggctttaggcctgataagaattgggatcgaatagcggggaaggggagatgggagagccagagaggggataagaggaagagatgaaggtgtgtagtataaagggctaagtgcagtgtcgagtgttttgtctcaaaatggtccaaaggtgtcaagtgtcaagtgtcaagtgtcaaaagtgtcaaagtgtcgtcaagaggaaggaggggaggctaatctaagcgcccgtgctccaatgaaagactatcagaaacacgattagccccgaattccaaagtccaacgataaaaagcaaacacttactccgtatagagattagattgtcaaggtagctggaccagcagcgtgagacatgcgatgggtaagaagtgaaagaaggtacatcagggggcaaaccttggaagaagaagccctggagatactccgcaggtaccaattgccgcagtggagtcggggctttttgtggatccgatttagtatacgaaacgattaatagggatgtgcatagggatgttcataggcatgttcatagcgatgttcgtagacatttcacactgctgtacagacatggtgcaattccctatctttcggtctatacacttccacatacctcaagcacccaacgcttttcaagccaccaagggcgctatatatccaatcagcatagacaatttgctcgtctcatcctgaaactccactagacccaatcggattgagggacccgctgctgacgagttttgagagctttgaagatcaaagatattcagtgacattgtcatgttgttaaatgatttgatattgggcatccctgcctacgatctactgccttggtacacttcctactccatagttaataatatgatcaagaaaccgcgcattcctaactaacccatcctcatcatatctaggggcttcttagcgcccgaatttcgagactaatctaattaatgaaaccttggattaattggttcatttgttaatatgcccctaaccctcgtataacggtagcttctttccaaattggaggcttggctgtaatgtatcttcctcaatctggcatttgatcagatgcccgtttgccggcttccccgttcggtcctcccgtttccaatagagtactttgctcaagtctctaatttgctacactcatatattcatagatatgaccccaatggctataaatgtctgcaaccagcgagtatatcgccctttgcttgtcaccgctatgtcttgctcttagtagctaggttctatacggttcattgaccaccttgacttgacccgatggattggaagcccatgaaacaaggaaattcaagatcaaccgtgactcggaccaccccacatgtagacaatcaatatccgcttgtaagacccagcgttcatacctgcatatacaccctgaagtagatcgtcccggtttcgggccctcgggaggccgtagaactgcttacgcttacacacaacgcaatcttacctaacaacctaacattgaaggttaactagttagtggagcctctgagcttgaatacaatatgcgtcgtacaaacgtattacaatttaatgaaagatggtggctttgaccttggaaaatccggggtctattatcctgagctctcaaaggcgtgggggaggtacggagtagaaagccctaaatgtctcacaccatacggagtacttcttgtattcttacaattttcggcgcatgaacatactaaataggtcacttctacgcaaaccttgtgtacataatctctgtttgtttcaggccaataataaacatccccacttgacaagctagttagcgatatacctattatcacgataacactgccgagaaaacccttttttttttcatctgaaactttcaactccaaaggtactatttgcgatatataagacatgaggtatgagacaatatgacagcattgtagaactagtcggaactatggaaagggagagggaaggaagactggaggtatccagatacggtatgtgacattgtgagatattgaaacgccaggaagggcagttgtaaaccgttcgctgtcaccttgtttatactaacacaacacagttcgtcgaggaaggatagaaagatagcgaatgtgcggagtactactagattaggcgagagtttacggctttcggctgatggagctgacggagctaggttcgttcaggcttagacttgtgggtgagaatgaaagtgaaatgaggaagtcgatgtggcgttaatctttttgtcgatattcgcttaggggtgaaacattgtatagccctacggaatacacatcggatattcaccattcagtatacttccaagtttctagaaccttatgtatgtctgaccatttcgagatgaatatagacgactacaacattgtacacaaccgggattcagggattcaaacaacttctgtaccgggagctatatacgagcagggcctgacgccaccgtgattgtctcaccacaaacctccatcggttaaaacccacagtggagttagatagctaacgcaggacactagaccctgaaaggtacgccattatctgtaccttcgttgtcgctcaaccaattccgtccgagtggtcagatgaattcaccagcctcaccccgtttagggcaatgtgccacatccaaccaccactggagaagatatcaccagagagtagcccttcaacatcataactcaatagtatagccgacgccaagccttgctggagactgatcagcatgaataaatcattgaacttcaggcatgatggggccactgatcagttgttatgtagtgagacaatcaataatccaccttcagcgactatttcgagtcggccgaaacatatgagggggaatagttcgagaacccatgattctaagacaaagacataaagacagtcttcctcgtaattgaagacaatatcctcacagcaggagtgaattcatgcagaaactcaggatctcagtcggttatttatctccgggggttcggctccagccgacacagtggatggaagatagattggaaatagttggaaatagtcctaaaataggaggattgcgcatatctcccataattttctattttgagaattgtatttcgttcatgatcctactctgtttatccgtacggagtagaagaaaatagtatagcagcctattattagcacaatcgagtagtcagccgttaaactccaccaaggccagaccaaacaaggcgcagcaacaacaggccaaacccactgcgaaaactaagccactttttttccactttccttgtgttttgctctgacttcgacttccgatcctgcccccgggatatgccgcattggacgacttagcggccgacttacgacgcacgcagatttacgtacctccaggcaccggcctaacttcgaacccccccaaactctatcaggcgagactccaggatccttggtctattccctgcagtgatatttttttgtcaatcacagtgccctattgaccctgggaaggggtgcgcgcggtggacgagaccccgacaccgatccattgtcaacacaacgtggattcgatcatctacgccgggggttgacctccccgaggaggtcatcccggatgcccgaagtggacatgcacgactcgacggagatcgagctggacggacattcatcatcctctcgacggaaagcaagcaggcggccgcgacgcagtggattacacattttgcaaggtcggccgtggcccgacacttcgaaacgccgagcacaaccatggagttcggtgtggtggattgcactgctgtacttagtgagctttgcatcgccaggggctgctgttcttttggactttgaaaattgtctatcaaaatccatcctcgagtccgaccctctacaacttcaattcgttcctaccaacgtgtccgtcaaattcaaccttaccaaccctctacacccgctcgccatcacggtctatggcaatgtgtcgggaaccacgtctcaaaccgcagactatcccgcacccgattcctctgtatggacaaatcccaattggaccgatgggaagattgaggatgtgagcactaccaacaacaagtacagcacgctgatgacggatctcaatgtgcttagcttcacgccctttagcaatgcctcccgtttccgtgacgcggtcactcagggcaccctcccgctgggtccggtctttaattacaatatgtaagctattgcaggaagagaaagctctgcgatttttaactaatccctttctcttatgcaggagtgatttgaccacattacgagcgttctcggttcaacatgatatgctttcaacttaccgtttcggaactatcacacccttattgatagttcgctctggagatgcatccgccgttcagctcgcctgcgttttggtgaacgcgacgccggacttgggaacatctctcaaaagtgccattgcctatgtgcctctcatcattttgatactggtgggaattgcgaccatcacggccgccatgtttagcccttggggcacaaccgatctatttcggtggacaagcaactacggccgcgatgaagatgttctccgacttgtcactcctggatttgcagattgcctgcaataccttcaattcatagtattaacgggctcgctttctttgaattacccaggtttcttccagcctatagtgagtcagggagcatggtcgactctcatgttcaaccagagtttcgtcagcactgaaatcggccgcgatcccgttgtggatggtctatatgccatcaatggaacgtatggcctcgaccgaatgaaccacctggttggcatggcctcatctcaggatatctggcctggtatgatcatatgggtgctggtaatcatggcttgtgtgacggtggtcttccagatcgcattcgcgctccgatggctgtatcgtgagttggcaaacaacaccgatcaggatctgcgtgccagaaacatgccgttcaccatggggaatctcattcgcattgtcttcaattttcttctcttgccaatcgtttccctttccttcttccaattggttattgctcgtcaatcaaccgcttactgtgttgctttggcggccgtggtgatcgttattattgcttgcttcgcgatttgggctatccgtgtggtccttaacactcgacccaaagctcaccttttcgatgatcttcctacagtgctattgtatgggccgctctataatacatactgtgacgatgcagcagcctttggtatcgtcccaattgtattgaacatcgctcgcggaatagccattggtgctttgcagccgtctggtatcgcccaagtggtaatgctggccatttgcgaagttgtgtctgtactaaccctgctggctttccgacctttctcaagaccaacccacatgaacctgtatcactgcctcttctctattgtgcgtttcttgacagttattttgagcgtcgtctttgtgccgtcattgacactttcggatgcggccagaggctggatcggatatctgatccttgtgctgcacgccgtggttctcattttcgggttcttcctcaacgcaatgcaaaccttgatcgaagtactggcaagactggctggtgcgggcggtgccactcgtggtggcttgacgaaggtgcttggcatgcgccagctctcgaggcgcactccgcgacgtgatcttactcgccagagtatgggttcggaggctgctatgcttggtcacggtgacgatcgtatgtcatctcagtttgatggatcgcgtcctcgcagtctctctgggagctctggtctgcttttgaaccgtgctagtgatggcagagtcagcaccatctatgattatcccagttcgcaaggaggcacacacagccgtgctgctagcgggggattccccacacctacctcaaccacctatcaaggagctggcttccctagctcgcccagtagtggtaagatgatgggaacaaaccctcgtgatccctattaccggccacctcgccccgggcgaagaacgcccccagcaagtggtgctctcgcgaaggggaagagcccgtcaagaggcttcttgaaatcaaaatcaagccgccgagcagtcagcatcgatgacgacctgggagatggcatgtctggccgtgctacaccagttccagcatatctagcaacgccgaaggatgatatggagctcgatacccctcgcaagccgaaggattatgctgttcgcgaggttgatttctactatggtgtccgaggcccaccgctctcccacagcggtacgcgaaagttgaaaactggcccagccgaccccacaggtccagtctcgtctgcgacgggctggttccgaagcttgctccaagggaagacgaaagacaacgccaaaggatttgaggtggtccgaagtgctcgtgcgcctcctccaggtctattcccgagaagagacgactttaatgatccttatcaggatgatataggcatgccatcagccagtcattctcgggaagtgtctaccggcaatgttccctatcaggattcggacaatgaccacgaccccgaaccgtcatgcccgccagtactgccacaaattaatacctcaggtggcggtggtatcgaattgcccagtcggacggcctcttgccacacacaggcgcctggtgaccaagacgcaggaactgcggctggccttccagttgtgaccgagaccctgtctcacaactctgatataagccagcactacgagcactcagagcaccatctccagccagaaggctccaccaccgcgcgcctgcctttcagcggaagtagctcgccatctcgtgaacgaggtctgtctatgacctctacttcaaggtcaagatcaaacgcctcgagccagcagacgggtgctcgaccctcgagtctgggctatgtacctcaacatcgcgcgcacgaccacatccacgaggggagccccgacgagccatcctttaaggggagcgcagcagaacttgtcgatgaagcttcgctgggcgggcacgagcgttaaaagtatgaaaaaggcagtcacatatgtattttgaaccactatattcgtcttcttcgatatctacctctctctatctctgtctcatggatctcccgccacttattcctcatctatggatatcgtcaccaccatctcctgcccgaaataccggcgaattgatgccaccatcacgaatctccttgcttcctgtgcgtctatctcttgctttgtttgtcaacctaaaattgctgcaacggcgttttatctctgatcccgaggtacacctaatggggagtgaactcattggcttcttgctatcttcctggctgtcgctgaatccagacgacatgctgttttcttttggaggctttgcttctttctgtatctgtctcttttcgctcttcttgtatcaatcttaggacacactaatgccgggatcataattaatgaggacttttcattagcgcactctcttagtggtaataataaggtcttgatatgtcttagaactagtaatagttctcaactatataagcaacgtatatcttctgttgcaattatcaattgaactatgggaggcttcgagcagagcggaaagaaacaaccgaacccgatagcacgcgggcagaccgggccgataccgtcaatcgccacctccctcaccgcccgccccacgataacagcctgtatctgggcccaaacataacgcttgcaccatttcctctcttgtctctgtgagtcaagtgtcaatatccttgttttcttctttgctgttgccatctgctgttgccatctgctgctggcatcgctactgtgttgctggcatctgagagcatagtcacaagactctcagcctcatcatctcctaaatacgacccaatcagccttggctccatgataagcatcatcctcacactccttaatgtgatcttcggcaaaaagcgtcaacgtcattgaagctgagcccaggattgcataaaaggacctcatctcctacacctatattctcgacatccccgccatatattcccctcgtcatcgccactcgccacctagttcatgaagactgtcattccaacggccgagatcgatctcgttgcctctgtcggacagaatatcacagaggatctataccgttgaacttagcaatcatgcctgggtcaagcacggcatctagctcggttcagtccagctccccgccgaggatgcaggcaggcacgaggccggtcgaaagaccagaggggcacggcacaacacaacctagaagctacagcggctatgaagaaggcagctccaggacgagagtctttcccattcgccccaggtcagaacgtaaaagacgattgaccagtaccggcgaggatgcgaggtcgcaatggggacagtctggaggcacggctggaccggcccgagacaatgggggaccctccagaagtatcttgccgcatagatctgtctcgatggtattgccttcgtctcgtactagaacttctatatccacagcacctggctcgtcatttgcaacagcaattgatatctcttcctctcctccagggacgcctcgttcctctaattatggcgaacaactaccgggtttctctcgacgggagcatccaacaccctggattaatcaatctcgctccgttgcatctgttcacaatgatctacatccaccatttatggatatggctctccccaaatggcaggcagattcggacgtgtcagaatgtccgatctgtggggtagtattcagcttctggcacagaaagcaccactgccgaaagtgtggaagagtcgtgtgtgcatcatgctccccacatcggatcacaattcctaggcaatatattgtccgccctcctgagttcgttgacttccttcctgattccccgccaattccttccaactctccatcagtcgtcgatctcacaggcgatgaccctgttatatcatcatcaccattatcatcaccatcagcatcagtagcagcaacagcagccacactcaaccctgctcttggcggaggcgaagaagtacgactttgcaatccatgtgtgccagacccaaacccgaatcccattagctacagtaccgtgcgggcacacggccaccgacccacccattctctttcatccactatggccaacacataccatgcctcatcggtaagttctcgccactttacttaataaaaccaagctgacaagaaaacacgcagggtccaagcaatcccgaagctcgtcaggaacgacgaactgtgggtgtaaatgatcgaccgcagttcttaaatgagttgaactcgcaaactcgccaagttccctcgcccaccgctggcatatcccgaccacatcgttcattttccaaccgcgacggtaacccaacccgcggacctgcgttgaacgaagatgatttctgccccgtatgcagacgtcaatatcttccactgagtcctgaacagcctctcgaggcgcgccaagctcatacccgagcgtgcatcgagggttatttgagaccaactgccccgccccggacatcatccttgcaacatgatcatccactgccccatcctccaccggtagcccgtatgcttccctttgtggccacggagaaagactgcctcggtgaggatggccaggcagcagagtgcacgatctgtatggaggactacgaggttggacagaccctggcccgccttgagtgcctgtgcaagttccacaagcactgcattgttgactggtttgagaggaagatggagtgccctgtccacaagttttcctaatagggtgcacatccatctaatatgaatttcaagaaatatttttgctagcttagctttttgctttttactacttttggctcacggcgtctggtattttgtttcttatatcccgcttagcgtatcaatgaatctaatctattttatctcgaaacctatcagatgctgatgcagatgccgagggtatgtaggatcatcagtcacgtggcccctgatgttagttgaaactcaaaaatcaaaagcacttcacttcacttttggccccaaagtgaagagcaagtcaaacaggacccagtggtattataagtgagaggtaagcctggtgttatgcattccccttacttgacattattccgatgaggtatgttgatcctccacatcggtggtcggtgtttgtgatcaccgtcctccgttttctcttgtcgcacagccgaggtgtcagcaataaccacactgaaaatgggataccgagcaatcacgtctactgatgaagaattggaattaacgcgaatttgtaacagtgataggtccccgagccggtattgtaatcccgcactgcatggaaatcgatccgcagctgcaacacgcggaccctcagcggtctttttatacaccgatccgaccgacaatgagcacaggcccggaatacccggagcccccatcacacgcacccctcaacccttacccaagccgggatacacatggtgatggacgcggacacgagcgtgggcctagggacacgcacccatcattcgggatgggcccagacagcaaccaatccccagatccgcatgacccaccaggcgacgccaaacggtcgcgtgcatgcgagccatgccgacagctgaaagtgcgctgcgacccagacccggcgcacccggaagggtcatgcaagcggtgcgcgaaagcgcggcggacgtgtgttgtaactgcgcctacgcgcaagcggcagaaaaagaccgacagtcgggtggcggagttagagcggaagatcgatgctctgacggcgacgctgcaggcatcaaattccaccagtgcgctgttctctggtggagcggggcaacgggatgagccgcttgctggtcgaagatggattgctgggagcaagcgacagcataccggcgaactcaaggatccctctggtgggctgttagcgccgcggtactcgcggccgggtagtccatctgcagagcagattcctagccatgcatcgaagcattggcgcagacctgttggtgttgattctgcgccgccgccgccaaaacatgaggccgggaatgagtttgctgatatgatcgatcgcgggattatagattacaagactgcaagcgcagcgtttgataggtatatccaccagatggcgccagagttgccttttgttgtttttccgccggggactacaatgggcgaggttcgccgcaataagccttatttgttccttgcgatcatcgcggctgcggttgccgtcttcaattccgacgcacagccgatcctcgtgaatgagacatatcgtctgatcgccgagcaggttgttgtcaaaggccaaaagtcgcttgagctggttcagactataatggtctgttctatctggtatctcccacccgataacttcgacgagatcaagttctattctttgatccatatggcggtggtcatggcaatggaacttggattaaaccgtcgcatttccgataatagacgcagcttcagcgtgatccgcgaactgatcattaaaaagccgacgggtccggcatttgatccaaagggaccggaagcaaggcgaacttgggttggctgttatttcttatctgtccagtgtgtttcaatccgggttgttatggtatggagatcgcaagctaactttggcaggatgtcggcggctctgagaagagtacacttggtcacctggcagccgtatatggacgagtgccttcagattttagaaacccacccggatgccctaccctccgatcgaaacttgaaatggtggataaagctgggatcgatcatggaggatgctggaaatctcttctcggaggaggatcctgggtgcattaccaccttcgcggacagcaaggtttggtataatattaaaatgtttgaggatagattggcacaatggagagaggaggtcccacgggacgtttacactggtaagcgctgatcttgagaatattctttaatattctgctgacatccttctagagccaatggttcacgcagaacatgtcctgaatctcttcgtccatggatctgcaatgtgtgtggactataacacggtcaacaactctccatctcaggatgatttgcataactcatcgattgcgattgatgcgttgagcacggccatccgctgcattcacgagagtctagatgtcatttgcaccatcaatattgaccgacttatatccttgcctacgacatccttagcgcggacatcgtatcccgtggttagtttgataaaaatatactcactgttcatgtcgccggacagtcgaattggtcagattctcgacgtgcagagtctcaaactcgattattatttggacaaagtcatcgcgcattaccgtgccgccgctgcgcgcgatggtggccgtgcagcagcgagatttggaaacataatggttctgttgcgcaattggtttatcaagaagcgcgaccagggagatcatggccgggaattgaaggaggtcttttcgaatgatcagaaatcctccgatcaccggcaggcacatcataaccctgataccccgaacgcggtatctaccaatccaagagcgcggatagcaccgggcatgacacctcttcatttcctcagcgaagtagccatgggcgacccagcgcaccgagcgaacaattccaactcccaacgctcgatagccggacaatcttattcctcaaaccacagtccaagctcaacagtcaacccaatgccaacgccaagctcatccaatttcgtgccagatccaccccaaaccagctggtcatctagctcatcatacccaaccactctcccgagctcagactcgaaccatatcgagacgaggggttactaccaaccctatccatccaccgaaatcacacagaattatccagatttaccgtcgagtacccagactcagggataccctgacatgtccaccgtggctggagtgcagcttgctcctccgatgggaatggcacccgaggtaggcatggacccgaatttcggtgatccttggtttacgttagggaatatgatggacgagggactgtttacattccctctttcttttgacgggaatttcggattgttttagtcggcttattgtggtgtcctgtctcctttgctcattatacccgttgttgtttcgaatgtatatcaatttcactcatcgcaagatgcatcatcttcgagggataggctcggagggaagccatgccttttcgcattcagtcactctcgtaaggggaacaccaaatctaactaggattagtgaattacgaggaacacttcatctaggcagtaagagtaaggcttattccttaggaatagtctagtgaacagtataacggcaagcaatgatttcctctgatgtattgagaacgagaaacctacgcgttctcggctacggagatttacacccctcatgtattccgtgggactcgtcaaatggcaannnnnnnnnnnnnnnnnnnnnnnnnnnnnnnnnnnnnnnnnnnnnnnnnnnnnnnnnnnnnnnnnnnnnnnnnnnnnnnnnnnnnnnnnnnnnnnnnnnnnnnnnnnnnnnnnnnnnnnnnnnnnnnnnnnnnnnnnnnnnnnnnnnnnnnnnnnnnnnnnnnnnnnnnnnnnnnnnnnnnnnnnnnnnnnnnnnnnnnnnnnnnnnnnnnnnnnnnnnnnnnnatgcagacctacatggacctcatacatatggtaatgtcatggtccctgtggtaggtgaagcaccatctgctacagtaccctttgcctgcgctgtctcatgggggctacggagggatggtggtcagagggatggggagaggagaagaagaagaagagaagaggagaaatggggggaggggtcattttatacctcaagcccatgtgccttcctaaagtgcgacaggtccctcgcaccttccctggcaatgtcaatgtcacatgtcacccatgtggatgatccgatataaacatcccaggttatatcgacatcaacatccattgaaattcgtacgtctcggagaattgcattctccgcggctccgtacactttcagcacagcttcgcaatcaagatctactatacatcccacattccaaaccagagcaataatatccgagaagagcatatcctattcgtggcctgcagtcaatttgacctgcctccagtcaaaatggcccctcatgaccccaaccgtgtcgctagcatcatgctctcatggcactcgctcgagctcatctcgtgcaccaaccttcaaaccctatgggccgggtatggacaaatatgcgctatcacagcgcgagccaccacctcccaagcagccgaacatctcagcaagctgtgcggggtagagcctggtgttgtggggacgacgtatccccttatcctgaaactcatctcaccgccccgaaaaagcgccagcactgcagacgagggccatctacggaaaatgctgagctacgaggtggaacagtacttctatagcgaagtagtccctcagctgagctgcaacacagccatagccaaatgcgttgcctcgacgcgcgacatggactactcggcagactcgtcggaactcagcggtcttatggctacgatcatggttgatctgcgtcctgagttccccatcgcgggtgagaagagaggtgcgctgaaccgcgaacaggttcgcgcagcgctagactggctagctggattccacagctgctcaaggaaactactgccatctagtcttgacggatatattctgccgccgcttgaagaacgcaatagaagacagagacagagcccagacaaggatgttggtagcgggctgtggctgaatggggggtatacgtacctcgcaacgcgacgtaaagaatacgcatctcttgcacaggacacggactcggagtggtcagatgcgctgtgcagggtttcggaagggtgctcactatccgtggcggagatggttgcattgttcctaacgccctgcgggagggcaattgagtcttatattcatggcgatgtcaagtcggaaaatcttttcacgactactaatggagacaaggtggccttctttgacttccagtatgtcgggctcggtttgggagtctgtgaccttgccaaattgtttacctgctcggttccgctgcatatgctagttgatggaaatgggagtttgcccgcacagctgtcaatgtgtgatgccgaaagggcactgctagagcgatatcgtatgagtctcctccaagatgaggaatcggaggagtcagagctatacgaatgggaagcgttcaaacggcactgggagacagctttggttgattggtgtagattccaggcttcgtggggattttgggggaatactgagtggcttgaggcccgtgtaagatcaatcttgaatgaccaggagtggagagactggctgtatcagaatatccgtggtcgagtgtaggatcatataaatagaaatgcactgtgaatatatcttcaactccatccagcttttgaatagtgaaaatggggagatcagcggttatttgaccttcctacttaccagttgtttgtatgacttttgcttgatgattcgagataggtcctgtttcttatgctgtcgcagaatgaaaatgtagtatgatcagattggtggagctgcctgagcctcacagcacgatcagcgcctaagaacaattctaattggtctatatcatattatatgtaaatcaactgggtatataactatatcggcctccacgcttgcataacctggttgcgcatatatccccacggccagccgttttccctttcagttcgacgaaggaggtcaatcagcaaagtttgtacaacagggtcttccacccatgagccgcctgtaggcatattagtaaactctccctcatagaatgcgaacaaaacatacaggcaaaaagtgcgtgacaagccgtgatacgcagtgaagggtcgtcgtcggcagatgtggcgatgccgaacataaaattaagcgtttcggccagatcatgctgtcggagtcagcataaaatcgaggtgtttcaggggggggggaagacaaacccttaacttgacaggctgctctaaatgcaacatactccgatcataaaactcaagttcgcgaatgagcaccaacgatttagtgagacagatgtgctggaccgcagtagctagatccaaattagcacctcatccccaacgcaggcttatatcacataccatgccacaggctcgtataccacgcaacaggaaaaggtttcccattcccaggatccgccggcgagatatgcaacggcacaaacgtatccggtcgaccaagctcccactcaagaatgcggtgcctgagcgcagcctcccccgcactgccaagtctaccgtcatggcttcggccggagatattataacagaaatcgatagtctcggccaatagccagattgcccggtttgtccagtctccgtcgctcagggcaggtttggcggcccaccatcgtcgcaggcggtcatcgaacggcgcgaatgttaagcggaggcatttctggtacgtgagcgcgaattgaatatcttgaatgacataggcccagaaagaagccgatgccagtccgcccgagatagctgagtccacgtgggaactgatgtataccgaaccggccaggagatggtgttgttggtcgtttgggggactatgggctgttgagtgcgttagccgggggtaattattttgcgttgaagattggtgatccacgcacaggagattgattcgaaaaatcgtagaatgacggttgacgagaggaggatgtcgattccgatttcgaactcgggcttgtcgaggaccggcaacattattgagatacagcgctcatgatatccgtgtgcgacatcgccggcgatggagttggttgttcgggataggtgacatgctgagactgcgagacaagcatacagaagtaatggggattgggtcgcgcgctcgatgacatctgttgagaagtgtcggtcgggattgaatgcatcgagctgggctgttagtggaaaggcggcgaatgtgataacagaccaacttacccacggcgccaggtacttttgaaaatgtcgcaacagaaaggcttcagtgacattggatagcctcgggtggccaatgggcgtgggcgtggtggttgcacgtgacgaattcccagaattcgatctagagcccaattgagatcctgcaaaggcaggaaggacgagggttggagttgccaatgaataatccatcgtcgatggaggcgtggaattttcagacgatgaccgtgaagtcgacgcctgccttgtcacaggtacaacatagtattccgctgccgtctgatctgtttcgtccttgaagtggactacaagaaatcagtataggaaacagacgcggagaacattccacatacagctggaggacgtttcaacccagacctggtcgtccgggaaagcaagatcactctcgccatatcttggaggcccctttcgcaaggatgggttctggccgtgtcggaaagagatctcttcagatttgccgggggccggcacacattcgcgaccagagcgttgacagcggagacatttcgaaccggatttgtcacctaattctgttagtgccgagagcagagattcggagtaggcaacgtacatttcagatggcgcagacgacatgtgaggctgaaacgacgggttagtcgaggtcgagtacgcgtaacgaatcacaagaactgaccatcccctcattacgcagtcaaaaagtacaatcgcaaacaaggaaatcttccagaaagcatatttggaataccaggcccgagggtgagatatgtaaatagggtaagtcggccagtccgactatcaaactcaaccatgatgtctattgggagactaaccaacgcccacccaggcgagatggtgtggggaccgaaaatttggcagatcactaacggattgcgtattatttttggggtttaccagcggctacgttttaattggagattagttcgaagagcttagagctaacagtggttgaaatgtcgaatagcgggtttcaaatgtactggaaattagctcaaaccatatcccgaatgtggaaacgttcaatatccgagctcatcacgggtctgaaaaaggtccaatttccacgggagtctaggcagcctggcgttggtcgtggttgggcggctggcttccccacatatcagactaagtttcatcgaaaagattctgatcgtttacctaagaaaagatcctgtgacatgtcatggaagttccggaatcgggttctcggcatgatagttggccgagacattggaagttgcactcggtacggaggagtttgaccgggcctgttttatcctctttgcctcttttccttttgcctcgttgccgtcaattgtgtctgcaatgtagagaacctattccgaaagaccccctcagaaggtatccggacataaatcggtataaatccggggctgattgtcaggtcagaacttaaaacctttcaagataaaaagacaaagcgttcgacaagcaacgggaacgaaattagaaacgaaaataagaacgaggttagtgttgaagtcgttcggggtctcctttgccgattggcctcaccggtcctggttcaggcaccgtacggtccagccacatggtacggaggaccgacatggatcactcacagggaccttctcatcccatgacaaggtgcgccggcaatctccgtgtgaggtaggagtaccaggccttgatcaatcctggttgtcggtggatcttcgatgaaaatgagattttaattccaaacccgtggaaaccctgtcgatctcagaggcacttcaatatgttgtacgccgaacagacgatcccacacctcccgatgctataaagttaaaaacggtccaaacaccagacaaatgggatttgcatatgtggggggctttctgttaccagctgcctctttcggccaaatgctccggggcgaaaagccacttgcattattcatcatttgatcagcaccagaagtttcaatccacggttgaattggagcaggaacaggagaatgaactgtgtggggagaggaagagagacaagagagaggaaggagagtcatgtggtgcctgaaattggtgcctgaaactgatacctccaagccttgaatccaaggcatccatgcatatcccaaaccaagctattccaacttcgaggtttcttatctttggagctccctgctggtctcgtagcccctgaaaagcttgaattaaacaactgtttccgttcactactgtggtgaaactgagtcaatcccaaaatataatgccaaatgtccctaaatcgcatctccttccttgaaggatgggaacgcaaccccgcggccatcctcagccaccctggatcggaggattcggaccccgactcctaccaggatctgcccgagggatccatttcatcttcatttccctccacatacagcagactgaatttcaacccgtatgcggggccaggctggaatgaaagcccagaggatccacacgaggatcgatcctcgtttttcgggccctcatttctgggcttgtctccgacgactacccccgaaggacgtgcgggtccggctccagtgccgggactgggatctgctgagcggactgcgcatgattcagagacgaccgttgctcgcacgccgccttgggccgatactactggtgcttatgaagtgagcgctgctaggaggattggtaggttgatcgaactcgcattatacttcttttcatatacagtggcatgttaacattataaaagcccaggtttgcacggcagtcgtatactgttttctggcggccggggttgttttcggctttgcagctctcaagcccatccttattcgagagaaagtatatcgcgacctctgctcccaggcggaacttgagaaagatgtcgatgtatgctatgggcaagagattcggtatgtttcccccgtggttgaagatcactcttacttacacgcaacaggctaaacttgatgtttactatcgccgctgtagtaaccaatgtctcagccctacctgtaggcacaatcctagacacgtatggaccacgagtcagtggaatcatcggcagtatctgtctcaccataggagcagtacttttggggacagccaacaagcttccattcgatggatacatcccgggttacttattcctagcactgggcgggccattcgtcttcatcccatccttccatctatcaaatacattccccaaacgatcaggcctgatcctatcaatgttgacaggcgccttcgacgcttcgagtgctctattcctgcttttcaggttgttgaacgagcacacgcatggcgtcgtatcaatcgacaatttcttcgccgcatacctcatcgtgccggtattcatcatcgcagcacagatcttgataatgccgtcaacatcatacaaaaccgccggcgaactcgtgcaacaagccgaagcacaggtcgtagatgagatgcgcgatcgcatagatgacacggtcaatgaccgcagcgagcgcgagcgccagcgtatggacagacgactccgtcgccaaagcatcgtcagccagatccaaggtctactagatgatggcacagcatccgtaatttccggcaatggcatcaacgactccatcttccacacgaacatcgacgcctcgctcgacgtaaataccaccacaggagttcacgacactccaacaccgccctcccaaacgcaccaacaaccaaccgctcctcatccaacaccaggcggaatatggggcgtgctccacggccatagcgcactgtaccaactacgcacaccatggttcgcactaataacagccttcactgttctaatgatgctacgcataaattactttgtcgcaacgctgcgctcacaatacacctacctgctctcggccgagaaagccgcacaaataaacacaacattcgacattctcctaccagtcggcggactcgtctccgtgccgttcatcggcacattcctagacgtattccagacgcgcactgtgctcttcatccttgtcgtgtcggcgaccgtcatcggcgtgctgggctgtataccgcatccgaccgcggcctatgggaatatcattctcttcgtgctgtaccgaccgttctattacactgctgtatcggactacgcggccaaggtgtttgggtttgcgacgtttgggaaagtctacgggcttattatttgtcttgctggtgttgggaattttgcgcaggcgggacttgatgcgcttacgttgagggtttggaggggagatcctgtgcctgttaatgttggacttacggtgctggttgctggggttggcagtgcacttgttgggtttgttgcttatcagacgagtgttttgagtgggaataagggtgacggtgagcatcatcaggatgtcagggagagggagccgttgttgaggaatgaaacacctgggagagtgtatggagcttgatcttatgggcttgatatgacggaggcgccttgtttgtattaagtatctaagaatgattatgaatgtgaatgtgattggatatgaggatggcacatgggagatttaaggatatttagggaaatcctacaagcactaatacgagaggaccatagcaatgaagactggaatatgaaatctggagacgtgaacattagaacgttatgtattatatctcgaatggttgctacccaaatagagatgtactatatacagatgtacccaaacatccaaagacgacaatagggcgcgaggaagccacagcctatgccagggcatattataatccagatccagacccaagagtggatctattatatccagtgcaatccaaaaaggaagaaagagtagtgcccgggcccgggagtgtttgtgacagtgttcgggtttcacagcacggcgagtttaggcaggtttacgcaaaatcgatatgcccagtgggtatatctatgtatgccccttgtccaagttaatatcgctggtgattgcgatgatacaagcccaatatatttttgtatgtccatttcaaagaaaaccgaggatgacaacgatagtgaaaatgagattcgaaggacggtgataagaaggctggtctgcgtcattgcagctcacggcagatcctgggaggaagcgcgtgtattcgcgcttcatgaggttcggagagattcccaatgagggaattgggctgctcattggatggcatagctatatttactagcgccctcctgccagagatcctctgcagcgcggtcacaggcagcttcgtaccataacatagttgcgaggacggatttgatgctggcccatgaattcaagccagtcctgcgagttacatctcccagagcagaggcaaaccaggcgcgctcgggagcatcgttcgctgcgataccgccgagggtcaggacccagatgagagggacgcgtgtggatggtgaacaccacagctctgaggacgagggtttgaagaggacggcctgtataaggcgcgccagggtactgaggggagtattctgggcggggattgggaagagaacgccgaccccgaagattagtgccgctagacggcaggcttcataggtggcggcacgcgtgggatgagagaaaaaggtggagatgtctgaggctggagagagggagaggagggtatgttgggtcaggttacgctggtcggcgagcaaagaggtatctggtgtgaaattcaggctcgctttaatgatcccgatataagtgtgcaccgcttggaaggcttctgccatttggtgggtggcgccaatttcctgcaaacggccgaatccctggtcgacgtctgatgggccgaagccgagcatttcttggacagaccagcctaatcgggaatcggcaaggggccagaaatcgaagcatgggtggacgcagaggacgctgcagctcatgatatccgagctatgagtggtcagtaagggcagtcagtaagaaaccaaaaagaaccgagacatacaaggaaattgtcgcggcgagaccctctgtggggatatttggcaatccacctcgcagtttgaccaactgcaacagtcctttgatatggatcatattcggtggcagacagccgtagacatcaatccattgtagtcgcaggaaaggcggattaaacggtgttctgcggtgctgctgtaccaatttctcctctgcctgatgatgagccatgcaaatgacactgaggagaacagcgtcgctgaccgcgcgatcggggtcacgaacagcctggttgatcagcttgatcgattccatttcacacagctgcagcgcacgacgctctctctgaccaaatacggtacccggcacccagttattctgccattgtacacggaggtgacacagcgagccaaacatgaaggctgtaaataaagccgggtccgccatggacagatcaaaccatttattagccgcagctctgacattcagtggccgcggagcgagtcccggccacacaacacccgtaagatagcgctctgacagattgatcatctctggctcgaagctcttcggggcggggtatgttgcaaaggggtcgaagactccagagaggttgcgttcaagccgctcaggagaagagcgatcattgaaccggatgacagccagcgcctccgaggagaacgtggtcacggtactcgcatcgtcgctgctactgctatcactgctatcgctggcctgggatggcggaaacggcgagtctcggtatgcagcctggttggagcgggagttgtgcgcaaaggtgaattgaccggggttgctcccccgatgggagctcgagggacgcgagacgagggtataggagggaccgggaccaggaccgggaccggcgtgcgcaacggcgggtaaggcgcggacaggtcggatgcgtgaactggatgattcgcctgcggatcggtcctttgtttctgaaatccagcgtccgacatgggcacgcaccagacgctgggctttcagtcgttcggtctcggaggcgggtctagcattgacaaaatgaatgctatccttcttctgtttctttcttgacgacatcaccggctcggcaagcggtgagagatatatgtaacagctagatcctgcatgatctttccgaaggggaaaagaggttgaagctcaaatggaggtttaaacaaggtgatcggttattgatattgacagcaaagccctatgtagatcatatcagacaaatttgacaattttttgtgacttttgacagcctcgaagatgtttgggagtggggaagaaaagggtaaagaggaagaagcttgggagctcccgtgaccgcagatcaatcgcgtacttttacttttatgatactccttttttattatattcgataattcggttctattatttgcttccaggctctgattcaaggattctattactagtacgtgcattctgacagtggtggagtcttctgcatgtgtatagtgactctatattgcacggagtattctgatctattctgtctgaagaggacctcctttcatagagctcaaggaaaaggactccgaatagccgttcaatacgaagtcgatcctgaaataagattgccaaacagggggttctcctttcaatgttcttgggcccagtcattccccgggaatcctagtatagtggacacatagaatgtcagactattgccacagcttcttttatttccatggatgctatgacactcttctacggtacaagcagtccccgttgcaattctatatcccccgcggtctagatgtctttgttcgaggggaattcctattacaatccgtggtagtggcagggtacgttgaactgccatatcactacattattatatacggagtgcgtcaatgctcgacggaaatatgattcccacggggtttgaccttttttgataggcctatggaaaagaagggaaaagaaaagtggctctgataggtgggaccccgtcgatcgtgaggttaatcatcttggagtggcaattccagtgaattcgacggagtaagtctatgttgtagatacttggaaatactattcattatgtctgatatagaagcacattgtaattgaattgttacatttagcctctttatgcaatttacatgctaacctagtctttcttttccacgtttgccttttccccatattatagagcttcattgttcctctgatgcaagccaaccggaatatgagacaatacgtgcttgattatgagtccagtcagcggccttctggttatctacggaatactccgtattccgtactccattcacacctcgagtgacgagtctcctcggccgaaacggctaacaatcactatgtattcctcctagtgaatgcagaaattcctttagctacaatttcccacctgtaaacaccgtgctcggatccgctaacccgcagtttgtgacagtaaagccccggttgactccgacgtcccctcatcttcagtcctgccgtaccgaagatctgcaggaagaatatacgtatagcaccgagaaagtacgtgaagaaaggctagtggagaggtctagacaatacacagctaatcagcgtggggtttgacgcctgacatgagggatatatgatatgtgatggcatggttagggttagcgctgacatcaggtagggtctgcatcgactaagactcaggtgacaggtccactggcattggcccgtcgatcgacgagaacatattaatatttagctagtccgagtacggagctggaaaggatgtgtgtggggatataaacgattgaagtaagaaatagcgaattgtcgagttcacacaaattcggcacgaaaggcctttcccgtgcagatcgacgagaattccgtgcagatcgacggagacgaaaacccaagagaatccccacagacatgtcaacaggccccccgcatatcaccacgcatagcgccgttacactgcatttatccccgtcactggaggaattggagctgtcgagaaaaaaaggagagagaattaaatattcgggaagaacggtgaactcgacctcgaaggatttcattgtctcggctccgacgccgctaagaacccaatcatcctattgacagcatacgagactataccaaatacgatctagctacatcactggctgcatgcactaacggggggataatataatatactccggactagtccggaagatctccccatcgaattaacgcattccaggctagtccaacttaatcaatttccaacagggtataccgacagctctcactggtctgtggatcatggtactgctctaacgccttctccacagcagccatgtagccaaggacatgctcctcctcccagcggcgaccgacaacctgcacggcagtggggaggccagccatcttggccgagtcgtagtgtttccatgcacctcgcgcgatgccgttgtcacagcccagacgctggaggacggttttgtaaggtgcgtcgagggcgtcgcggatagggtctacgtggccgacagggatgacaccggaggagtagtcgagcaagttccacaggaaggtgtaaccgcacgaggagacggcatcgtgcatggccttatgcgggagagccggggtagcgttgacagggcacagaatgaaatcgaattgttggggctcggcgtcccaccacttgtgccaggcggcgcggaacgcttcgcgctgggcggtcagggtccagacctgggcggaggacttggggccgaagtcgcggatgagtgtggcggtgaccttatcgcggcgaatgtagcgcacgtagaggtagaagagatagcggagtggacgggggaggttagcgacgcgggtgagttggatggcgcctgggtcggagggttcgaagctcttgaggttgacgttgaagtgatggcagccatctgagttgagaagttgcgaggcgagattcagacccgtgaaggggtctgctgtgggtggggtggtgatttctgagactgtgtggccggcttctgtgagcgcagctaccgttgttgtgatggcgcgcttaatagccggggttggggggacaacacctagagatttgtaagtgggctgactttgactatcagggtgagtgtcggtacataccatcggaggtcatcacaccaatgcgaagaggtttattttgagcctcagactcgacctcgctgcgccaggcaatggggtgcacagtatgctcatatttccagggctccatacggataatcgcacgagtgaagtatgtcaaatcatccaacgtacgggccataggactaaagacactaggaatgccctcctggccgggcatgctggtgttcacgccgcccttgggccagcggccggtgctgcagcggagcgaataaataccactccaggcggcgggaacgcgcaccgatccagcaacatcggatccaataccaatgcggccaccctgagccagcaatgctgcctctccaccggttgacccaccgggcgagtatgctggaacatgtgggttgcggcattgaccccaaagcccgttatctgactcgaaagagagcagggtgattggcagagcagtcttaacatatgggacagcgcctatgaaagtcagtatgtaatccagctcccaacgaacgtgtcttaagagccataagcttaccggcgtcctttaagagcctcaccacaggcccatcttccaagataggctttccagccatagcagcatatccaacagttgcatcaaatcccttaacgtgaacggaatccttcaaagagaccggaataccagccaacggacccttcaggttgatttctgaccccagccatgactcggcctcgggcagcatcagctcggtgacgcagttggttcgctcatgagcccttttggctacctttccataggtgcggaggacatcgagtgcggagacagtcgagtcgtggacatcatgaacaagctccgcgataggctggtcgatagtcttccggtcctggtcggaaatggggagttgatactgttgcggaagacctgcaaagcggagttcccgttcgctttgtttttggttcctgtagatattagccccggatcatgtaagctcgagaggagaaaggcaagcttaccgtatgcgacggtaggcgaagtagtcaaatggaggaagcataatgtcggtgtgatacaaagaggagaaggagggggaagatggggggggttttatacgatgcggagaagtggagaagtggagaatgcgatatgacccggctagacgggtagcaccgaggttagccgtggacaccaaccctcagggctgttttgattgtacagttatatctagctatgtcgtacggaaatgggcaatatgtatgtagacttactttatacttgggtgaggtctgctttgatctcgaaaccctcaaaatatcggacaaatcaccgaccaccagatgccagcggcaatttctccgcagaaaagataaggagccactgcccagacacgctatgcctattgtggtaagtgcatgcgcctcatagattagatgccatagatagacgagataacttgatgagatagaggattaagattgtctatggtatgcagttctatataaaagctatctaagcaaaatgcccaacgccgtatggggggcgggtatatctccaatgccatgcaaactccagttcaacgccaaatttcaaatcaaatcaaaaacgcttcactagccaaagccggttattgagcagtatccggacgaggctggagccagttgttcttagcaagccaccatagaaccacgctgacaacgatgacgagcacgacggcgaaaaaaatgatgaagccgcaaatgatcgaacgcttgctcttcattctttcgcgggtaagccatgatgccctacagggggtgagttgaggttcaacaaatgtattggagatgagggtatcttacgcatcctgttttgcttgtgcccggtcaattgcttttgactcttcgtccatgtgaactgcagttgagaaccgtttccagaaatatgggtctcgaacaagagccataatgatatgctatcgaaccgaggtggatgtgttggtggatgcgttggttgttgcgtggtgtcgactggatgactgaagggatagtcgccggaccggctgagaagaaaacaaccactgatgtatgaggatgcaattgtaaatcgagtggtgaaagtggtgtgggtatgtcccatcaatgaggatgtcaatgtattcgatcgaagcagtgagttgaagatgggacgcacactgattcaacgagtagagtagaaaaaaaaaactttaacaacacgggctacggatattagttgcgcctatcctctagatagaggccttagcgatgaaatgccgcgtgtggaattctaaccacagacacatgtacatactcacccgagggctggaataccaatcaaaccacgatcgactgcctatccaattgctgatttgtgtaaaaattcccaagctcaggccacggaaaggaaaatcaaggcagacagatatttcgaggtgagaatggagttctggtattggttcttaataataatggttgtgactgaatgtttgttcggcgatggcatgccgatcgcggaatgagagattcctcggtggtggaattgttgatcgctgacattcaagcgataacattggtcgatgataatttaggaatgtgggcctgtattttctaacagggattgatttgataggaaaggacattatggtagaggctgaagaacgggtcgtatgtatttgatatcgctctccgaagctgtttcgcgtgggtaactgatctatagaccatgttgcaaaaatctcgactgggtcatcaaccggtatggatgacctaccccaagcctttctatgtactcgatgtagtgacgttgccaataaacaaacagaaattaggttgtagcgtcgatggttaggtatgtaggcagtgaaacgcaagcctcaatcgatgcagtgaagatcgtgctgccccttccttttgaaacttccagtctgttttgattccgttattgagtgttgataccacgtagtcagaccataaaacttgtcatgaaccccatccagaaatatcagtcagatctggatagtcttgccatgcgtcagcctatagaaagtcatcgcgcgcaactgaaatccggcgactaggtggcaactagcccaaataagcaggggtcaagcctaagaacgatgtgcaaataagttgacgcgtccgtattcgttgactggaggctttgaaagtaaacatccgatggttaagcgcagcagggagcgcagcatccctatgaaccgagacgtttctgttcgtagttgataaccatcattctttcttgggacaaggatgtggagagagtaagatgagaacaaaagaattggttgaagtgttcgatccgatagccctccagctccagggctccagttttgggtgggaatagcttcaattcaatggtttatgcggccgggacggttttcaacgctagggattcgaagaaagggatggtttgtagggtaggaatagcttcaatttagcggcgtcgaaagcggtaatgtaattcacaagcgagtgacgcacacaagcgagtgacgcacatcctagcttagagggagggttagtatttaaagataaatattaagctttataaggatctaattaggtaaaaaaggtactaaactagctactaagaagctatttttaattatctctaatttaaaagctttaatttatataaagggatatactttaaagaagttaagtttattaatatagttaatcctattctatatttttattttaattaactaactatataactactttaagactataaaacagccgatattaagtagttataaaaggtaagaggaatatagtagtatataaattagtataatattattttacttataaattttattaaactttagtattaaatagcttttatagctattaaatactaaaagtcgataccttccctttatatataaagaagttaaaggaataaagagcttttaaagctagtaaagcctaattttattagaaatctaactatttagactaactttaaaatactaattatttagaagcttattaaactaagatttaataaagactttacccttaaagattatatatagagggagtatctacctagaagtatttatatatttaattatagttacctacttataatttctggggggggggagccctgagttttatatagcccgcacgttagtaaagccctagttcttagctgtaaaggtagcgaaggccttcttcgctgagcgcgggggggtgcttcagctacttccaccggcgtagtaatcaattaagaagcttcctaaacggagaggccttcttcagaaggtatctacctctgggatctagtatgcttttacttctgcttctcgttggcagcctgtaaatcgcttacttctttcttaagaagtgcggtagattgtatagtaatctagcaggcttttaaaacctggttaatagctgaattaagcgggctcggagggcttcttaatcttatataaagcaatgctttaattgataaagcttacttttataattaaacgtagtttaacggtgtttttaggtcctaatcgctatcccagcttagggggggagttagtgtttaaagacaaatatttagctttaaaaggacccaattaggtaaaaacggtactaaaccggctgctaagaagctatttttgattatctctagtttaaaagctttatttcgtataagggggtatacttcgaggaagttaagtttattaatatagttgatcccaacctatatttttaatttaactagccgactatatacctactttaataccgtaaaacagccgatattaagtagttataaaaggtaagaggaatacagtagtatataaattagtataatattgttttacttataaattttattaaactttagtattaaatagcttctgtggctatcgagtattaaaagccgatatactccctttgtataagaagaagtagttggaataaagagcttttatagctaatgaaggcctattttatctaatatctacctatttagactaactttaaagcgctagtcgctaggaaggtctttaaactatgatttaaagaagaccttacctttgaaaataatatatagagggagggcctaccccgctatatttatatatttaattacagttacctactcgcgatttctaggttataaaagtaatctctaactatagtatttacttctagttataacctttactattatagttaatcctatagtaaaacccgtcttattaaagttataaatattatctagatcgattctatactaaagaatggttttttaaactagattaaaccactctctaataatccttaagtctttatatttcgcatactcgtaattataatatcttaagaattaggaggaaagggtagggtactgtttaataaagtttgtaacccaattttcgccaactaaaaggaccggggttattccacagtattcgaggagaatattcgccatttctcgtaccgaagagggccacggggctgaactgcgagaatccatagagagaatctatttctgaagagattcctcttcaatttctgttaatttatgcgagttggcgcgagaagtcgcgcggtttgtaataccgcggagacggcgacgtaacgtagtttcaggcacgtcgaaccggcgtgctgcctcacgaatagaactgatttcttgactcttaatagcctggatagctaacaagatcctgccttcttgctctattgaattttgagagcttcgagagcgaattggtggcatggtgggtggttgaattaactaagtgctaaaccatagacgcgttttaggtggggtgcgtcactcgcttgtgaattacgttatgtgattcaggcatattcaggcacaatcaggcatccatggatttagagcttgattatgtcatccgatagtcagcatgcatcgagaaagtctctcgtttccctgtcgctctgcacttggggtttagattaaaaagtgagaccaaatgcttcatattatagacgaaactacgaactctttgaatgaaaaccgaaagtagaaccgaaagcgatcgccacgacttgttcagctatgctctgcaaagctagatctagcacggagatttgcaccggaaaagtagagaataaacatgccaatctggggtataagttaacacatggaatgtaccaaattgtcgcataggagacttacaatccctaagatactcaatccagctaacagagtcacccccttctcaattccaaggtcaatgaacatgaatcgagagaagaggatgaacgcaaacgcaacaccagatcgtgagatatcatttccggcaaacagagaagctgcatacttcgggtacgcaagcggcaggtatacagatacacattgcaatataatgaagatagatcctgcatataggacaataccgaaggcgctcacagcccaatggatagttccgttggtagtccaggctaaacggcatgaaaattagtctctgggttcatattaaaccgccgccttgaacggggtgcttctgcttaccgaaaataaaaagtccggccggtggcccgaaagaagcgaatagagcaggggccaggcgatgctcgtgtgcacgttggccgttggcttttagatctggcatgagacgggtatgaagataaacaatatagacaacaattgcaagcccacagccgataataatcgagataaagattagcgcaacatccgtagcatcaaacccatatttggccggataaaccaacggaaacgcttcaaagaaggagtaatagattccataaatgagggatgtatagaaattggcgaatagcacggctgggtctttgaccattatctcgacgggttttatcaggcaatcaaggagcatgtcgcaaaatgattggctgttctgcacaatctcagaccgcgagaaaaggttcgagttcccagtaactttgcgtagtcgccgtgcgcgacggaggaggatattatcggtcgatgtctctggaagacagacggtcataagaacaaggatgggtgcactcagccaaagaatttcccacatcgcccaccgccaactgactaatagttagccactggtatgatgcatgcaatatcgattgactcacccttttttagcgattgaaaagaccgacaaaaccggaccaagagctggtccaccgtacgcagcagcaacccagctggtcaatcctagcggtaggtagatatccgaatactatagtccgatagattgtcagttctagcagaggaatacaccctcttacactaaaaggcattgttgcacgaaccatatctgtcatcgaggcaccaccacttgccagacaagggcttccgaaaaagccctggagaagtcgaagaaccataagtccggtgtagttgtccaccaaagcggtaggaacacacagcatgacaaagatgattaaggaggtaatatatgggatattgcgaccatacaatggaacctcacttaagggcgagaagagcaacggaccaaggccatctgtaggaaccgaagcgttagggcttatcctgcgagagatatggtaggaacatacagcctaatacatataatgccaaacccaatgaagccttcgtttgactgacttggaagtgttccattatctggctgttgggtaattagtcgccatgaaagttttgttgttggattgagagcttacggttcagctggaacgtagattgaggagccagaatagatggcgaacgtgtacaaactgtcaaggcttagaaaaactgttgtgtgagcatagaggtaaaatgcgaggtggtctgtaccatatctgaaaggtaacaaatctcttcttccataacgaccaatttctcgggtttgctggatcgtctggtccgtaccaatcgactatattctttgtctcatctcgcgtgtgtgctccatccgaatttacatccggggggaagtctgaagtcagtgctggggttataatagagttgccgtcgagactttgtttggactcaatctggtattttgtctctgccgacttcgatggaacaaatcccggcttttcttccggataaagtagaatcctattaccggtgatttctcgtaaaagctgtcccagaggtgactcgcgcactgtatccatatcttgcccagagttgataatatatagaatagcgagatggatcaaggaagatggttagctattaaataaaatgagataatgatcgtcctagtgcatatcaatcacatcaaatggtgagtaggtagggtttacaatgttgtacgacgcatgcaagccaccgtcgtcgaggcacatccgggaaattagagtaaacaacccccttgcatcgtctacaaggctcacaaacccacaagtctgcagtgttcggcactgttagaacttatacaatagggactctggattttatgaatagtcttctgaatattgcgagtgatttgatcttatatggaaatacaatctcagtgtgatgaaatcgaatctaaaatacgatgatctttccagatcaaccaataatgtacttcgtgtaacacaccacacctaccacacctcatgcgtgcatacataactatgatgttgaatatttatacaagccaagcaccacctttctcctaatcagctagctcatcgtatgagacgatcccaattgggtcactagcacattgcactataacagccactagatatggactgttttactgtaatgctgtaatgctctgttgtaattcctcctagtattcaggactttcctaccgggaagccgtctaaatcatgacttagttcatcctcctcccagtaactattactatcaaatcgtagagacagccccatggccctagactattcatgtcggatatttcacgcgctaatagccaatatatgcccctaaagcatggcgtacgtgaatctgcatacttggagaaaataattgcaaagaaaactcgaattttgctccaatttgttagctttgttacgttgttaaaacgtttgctcgccccaaaatcaaagcttagcgtgttgtacgcttaaactaccggtggtaaataaaaatcatttcctttcagcaggagaatctcgttgaaaaccccaataagacatctctgagtcgtgccaagtcctttggtctctgccttctcctgggccttcctcaataatcaagtgtaggtgtaggtttggggaccactgatgccgcccggggttgtgaccgtcacgggcacggcgccaagcgcgacgtgcggaggcgcaacagcagtgatagtgccgtcatcttcaacggtgaatagggctccagaggtatcgaatgtcactgcggtagcctgagtaaatccggacccggttagggttacgttattacccccaaggcgagatcctgtggtaggactcagcgctgccagagtcggagcgcccaaataagtgaaaggcacggcatcgctaaaagcagcatcagtcacgacggtcacaggagccagtccggccggtccaggaggggaggtcgctgtcagctggttgtctgaaatgactgcttgggccgtagcaggtgtggccccaaacagaacctcatttgtattcgacagacctgcgccgctgatggaaactgcagttcctcctgcagtggaaccaaaggccggggtgatcgaagatataatcggcggagcctcgaaggtgaaggtcagtgaactattggtccctcccgtagaggtcaccgtaattggtactgttccaattgcatgcgaaggtgtagtcacatccacttcagagtcagacacaacatttattgcggtaccagggatggttccgaatagcacactcgtagttcccgtcagaccacttcctgtgatcgcaacctgtgtacctccacttatgagatctgccgacggctccacagctgtgggtgcagggccagcaatgtaagtatactggtctcctgggttgattggactagatccattaggtgttgtaacaaccacatcaaccgtacccgcgacagtcgacgcggggactgtcgcattgagggcagtgcttgacaagacaacgaagaagggcgctgtaacaccaccaaatgtgaccgatgttgtgccagtcaaattcgttccggtcaccgtgacgacattaccgccgctcaatggtccgctgactggggacaaactcgtgacagtcggggttggagtaggattccaagtccaaacattgccagtatcagccgcactcgttccgcccgggttagtgacgaaaacattagttgtaccagttccaggcggagaaacagcattgatcaaagtgcccgaaacaatcgtgtacgatagagccgaagttgtgccgaaagtcacggccgtggcgtttacaaacccagttcctgtcaccgcaaccaacgttccgcctgtcgcagggccgttattgggattcagagatgtgacggtgggtgctgatatcgtagtgtatgtataacccccggtcagagtgctggtattgccagctgcatcactgaccgtgacgtctacagctcccggtgtcacggttgaggggacgaccgctgctaccgtgttgttggaaagtgctaccacgctagtcgcagccgtgccgccgaatgtcacagagttaacaaatcctaagtttgttcctgtcaatgtgaccgtgttccctccagaaatcgacccactggttggtgacagtgaggtgagactcggcaaaggagcaaccacatatgtaccggataatgcctgacactcaagacctttccctttccgttttagtgctcacttcttgccgctttttgatcactgagtaaaaatgagcacgtccctgagtaccctgacttgatcacgggcaattatataattaacgtaatctgctcactgagtatcacctgatcatcccctgagcaccctgatccacttactgatcattatctgagtatcctgatttgctcactgagtgctcactgaatgtacggctgagcggcctgagtaagctatatcactaaaatgcgatacgctaatcctatcacgtgtaaccctttccatttagatcgcctatcaaaaaaggactggcgcagtcaacgtgaccgttcatcctagcggtctcgaccctatccaagtgaaaacctcgcagtggggctattcaattgacccatcattttcccattccagcctatgctcctgggaataccctcggaatacttcgcttaccagcccggcgatcccctaatcgggctttggactactaccagggcgagggcgattggacggatttccttgattagagcccttccctgtatcaagacaactagagtaatcagtgtttagcaggtacgacgatgaactacttctctcgctaatgagcgtgtaagtcgaaggcgtttctgagcgtataatgtcatgtcttttgcgctatttctaagtaggttgtaaaccgaagacaaactatcaacagtaatacctagatgagctcctgcgggctcccaggagctcatcggtattattagggctctaaatgtctatagctatttcgttctaatcctaggaattctaagcctcgcccgtttggcctagcatttctgcctaaagtgatgccattttaaaggggaatatatatgcctagtcacttactccgaaaacaatagttttcatcattcctctgcatccgagttacttaaccaaaaaaaaaaagactgtttttgaatatatcacagtgagttcagcctttatacacacacacacacacaatttattaacgcccggcggctaagccgtaagggcaactatctctgatctactatatatagctctgcaattatatcacggacgtgatcttccacggcgattcgctcgtagttctcgagaccttgttcactgctaattggacggagaccgaaccgtctggcatcctcctcaagcgctatcaagggggtaaacaatcgtgcttgagcttcctcggttggctgcaggtagttgcacacagagctgtatattttctgctgtcgagctgaacaatcggtctataatgatagtcgtgtgggacagtattttccggtgggcggaggtatgctccctgtagttgagcgagacgatgtttcgactctcagcggtcgggaaagtaagctgtggcagaagcgcaggagttctgcaaatgcgttcgtcgattgcgctccctttgctgcttctctcgctcttgggcttgcttctctcgctcttgggcttgcttctctcgctcttcggcctgcaaaaagagtttcttgtaatcggtggggctggtattggccattgggttatcgaaagaaagagaggaattagggataccggtactcgagctagctggcttatcagctgatccggatttcggcgaaagtattgtccgaacgccgttgctgtgagttggttagacgttcagtacaatgggctgaaatttgggacaggcaagggacaatagttccgggcctatggcatgcaacccagaaccgaggttctgtagtatgtctgcgtcaaccacgacccggggacgcagtgctaaaactgtcgcacttggacctgattgtcgatcaaatattgtctctttttggccatctggcgtaactgtacaacctgaggaccgatagtgcatcacaatgctatcaaaaatactaaaggtatcatggatctctttgcaagttcttggaaagacatggcgtgatcccgtgtctgtcaaggatacacatgaagcatacaagatggacggagatgatctgcgcgggacccacatagtgtatatgggttccccggaacgcgaggaagctaccttcttttgcttcctcgcgctacgtcaaaagaaagtagcttccccgcgctacgtcttgtatctagagtcaactatagttgttctcaatattgattgttcatccagagacgctatctatctctatgtatacgtgggaccctcacatctcgcgaaatgaaatgcgggcaataagtgcgggcaagagaagaagaaacgattaacagccaccacgtagtcgagtcagtctgtgataatgagagcgccctttcccgtcccaaccatctttgcgaatcgcacctcggttgactcttgcttcttcaagcccacatccagctgcattgcccaaccacgtcagatgcgcaagtggcctcacagagtttgaaaggcaaaaccctcttcggctcaccatcgatgatgtgcgtctctaggagatttgtgaaatggctcatcacaccacaatagagataactccaatcagtagcggctctgtctctgctcgccttggccttgaacacaacacgctgtacaccaacgtcaatacgagagtttcgtccggcctccaagatgctcccatcaggcatgataggaaactcaataaatccagtatagtcacctccggcattcatgcattcatcagagaagtcaatgttgtcgctattgctgtaaatgtggggatatgcggcctttgcggcagtctgccagtccggttgaccagagcgcgggacgcccctcgcattggagaggaagtatttaattccctgcttcatcgcaccgagaatgtcggcgctgctagcgtactcaaaaccaagtcgggtgtcgcagccgatccattccggtatcttagctgcattggaaggctcgcccgggtctccttgaaagtccggtgcgcatgatgggggaattgcacgctttcgggtaatgggatgagtgctagagcccatatttgggttaatctcgcatatatcttcattggcttcaatgctcgctgcttcgctgaagatgtcgacatcgtctgttattggtcagtatgaacgtggatgaaacatgagaacagattgtcaggtatggcaagtctcataccttgtgctcttccaagtgatacttgcaattcgatttcagcgtagggctcctcaatgccttgaatcatcgagtcaacccggacgttgaaatcgtcctgccaggtggtaaaccatgaagtgaccgcttggaagttttcgggatccgcagcattgatcttatccttcaaatcactgatttgagtggacatggactgcttgagggaagttgctgaggcatgaaccgtagaatacagatccgcgggtaccgtttgcgaggcagtcaaaagtgacaaagcggactcgaaacacggcgtcccttgggccataatggcggacattccgctcgtgactgccgcggcatcttcgacaaggatgggcgtcggattccactcgccattagcgaggccgtccggcccgtcgtagtccatggggagatttgcctgctggccatcggcgctcccaccactgctgctgcttccactatcgctccctccgccgccaccacctccactgctgccggtgctatcggagtcaagatgatgttggtcagtagagcaagcgacgccacaggactggtcacagctttgaatgctgcaccctcctccacagccatagagaccacaatcatctaccgggtcgcttgagtcgcatccaccaaaaagtttgcaactgtcggtaccacagccgctagtacaggtctcagttagagtgccactcgaccaggtaacagaagggacatttgcgcccgttgacatagaactcgtggcctagggctgtactatgatagtgtgagaagtccctaggaagatgggtagtggggtagcgctgcctgatggaactggggagaagggagcttcattgcccaaaagcacaagctccgacgactccggcatgaagctttgaaggggataaaatccagtaggggaggtatcggcaccgatgacaacgggccaaaagggaaccttatcggtgaccagtgatgggacgttgagaatggtagtctttgtgccggtcgaggtgcctgaccttgtccatacagaactgaccatggaagggaactgaatagtcgtcgtcgagcccagtgggaacgggggtaaaatgatcttgcatggtgggatgcattgaacctcgggatccgtgttatcccagatgcccggaggaacatagacctcgccggagctcttactgccggcctcaacacaggcgccttccggacaatacccatggctacacgcaaaattgcaaagaccatggtcctccagcccatcgataggagtggctccggtgcctgtagtgggcggcgctggtaccaagccaccctgggcagtgcaggtgcaaacatgcattgggcagaagccatagttgcacgcaaagctacagaggccggtaagagtacccgatccagtgcctgcaatacatgcaggaggtgcgaagtctgagacggtggggataaccagagggacttgctcggtcccacaagcggagctcggacaatatcccaagttgcaattgaatgcgcagaggccagaataactggcatcctcgccggcgatgggatatccgatgacgcccgtggaattgggagccgccaggggcttgcccatttgccggcacgtacatgctgtcactgggcagtagccataggagcaagcgaagtcacagagaccagcgaagttgtatgcaccggtcccgttgatacaggcctgctccgagatcgacaacggcggctttgcggaaacagcggcgggggatgttgcactcccaacccaagcgttaaagagcccatctgtacaagcggacgagatggctttgccggttacttgggcaagctgacttccatcgcgggagatagtcacgataacctctcctgttcccgtaaaaggaacactgccatgataaattccaatttttccatccggagcccaggtcctggtgcacaatgtcagtcatatcttttggaatgtttaaaattgaattgagatgatctttaccatgagccttcctgcacgacgcctccgatgctgactgtcaccgttgcaggctcgaccagaagagcagagtagaacacgcggtcttgcacaatctgactaggggcaaattccatctgcagttggttggcagtgttccctgtggtgccactatcgcaggctgtaccaggggagagacgataccaggtgacgacgttttcttcggtcaccgttgccgttccttctgtgtacaagtcgatcaaaaatggcaaattcaatcgccaaccatcatgcggcatgtccttggcaaagttactgggggccttcccaatcgtgaaggcctccatggcatagtcgtagaggggtccaatatagtgagactcgccatagtcattccctggtaatttttagataaggccaaggttgtactccaaggtttcttgaacttacaagaaataatttccacgaattcaggctgattgtagagaacctcgacccagcgatcgtaccatagatcatcgcccctccaaagccagttcttgtcataaccgggcagattagtgaagaaccagggcgaaacagccatcatatatggctttgatccagactcgtttagatactgataataagaggcatcggtataggtatccatatcttgtgggccccacggccaacctgcccaactgaagagagcatctgccacgccaccacccaattgcgaagctggcttggcaccaatggaagaccaatcagggacgaaaaagacattgtactgttgcttcagatcgatccagtcctctgcttagttgggtccctcaaatgttaacacaatatattgccctttgtacaggtaatacgcagtcgatgccgtgtattgctctaggagcgcggccacgtcacctgctttccacggaccgttcccggcgtagtcaaaggaaaagaacagtgagaatttcaaatcggaagtaacttcaaaagcagttggcagaatttgaccaattctagagtcgacagccatattcagtgcaaacgcatcaaagtgagcatctttggctgcttggatgtctgtttgccagtcgactgtggtatagttttcggcgttcatcagctgtgattcatgtcagcttcttgccattacgtatagtaggaggagataggggctgtgatataccatgaagtgcgcgaaaacggctgcagcttggacttgacagtgccctaggagggccactgccagcaaagaagatagtctcatactgcgatacctctgcagagaggaacaattgttcgactatatcagaaagacagcccactgtcggttggacgggggagcaatgggtttttatacataattcggtcgcattttcctagtcaactccgtgctaacttccgtcttatccgcggatactgcttattacgagaaacaaacatgaaaatctgcctatttaagtaccaatttccggtattcctcattgtttaggatggtaccgaatgaaatacaggtccagtggtagactagattgttagtgcctggtagtgccatggaattatctagatgaaatggaaggccagatgaaaaatattgtactttgccacacatcaattaagctaatcgctaccctagtctcaggtgtatttctctcaaagtaatgataagatgccagggaattttatccttaaaccattagttaaaaggccatcttaataaacaggtagtatggcaaattctcattttcgaatgctgttgagaagtcataagtacaggctatgtgcaatagcacgccacatagaaaatttcgccaaaattcccctcttggatagcctaggtagcgttgcggagattggcatacttagcttcgcctcgggaggccgtgagactctagccggtggcgttggagctccaaccgagccctcgagcctcgaaacccttcaggcttagtctgtcacgtgcctatatatttgaaaacaacaaatgtagcattgagcatcggtatgtatcttgctgattagggcatagacacggagtttcattaataagataatcaagtatcttgtttgggttatcgctttttggtgaccactactgtgttagtgtccctcatttcctcaattctcgctctactctcgactagtgtaagtagaggaatactggaccactaattcagtagttcagggcaaatggttcacttccatatacagtttagtctcggagtcctcttcccgactttctttagtgtcgcccgaagtggagttctataaattactatggattagagctaggctacgctggtcagtatactccgatcgaggtaggatggttttctaattcataaatcatacccatgcatatggagaatgtcgcgagtgcgcattggccgataatgccctttttacatattccttttttttttctcgctgatagcacttaagatctctggggcaaatgtcccaccttggagaacacagcatttctccaaaagaggttttgaccatttcagggcccgcgctctcctgaaaccgcgtgtagattgtaagatttctatcagaacgcgctagccaggcgcacctgcagtacagtgagtctcgaaactgtggtgcatcctgtgaatataggtcgaacagcggtgtttggccctcgtatattcagtatagatagagagctttcctgaaaacccaccattcccgtcgcttcatatacaataggcgttggctgaaatatcctgtgtcaagtatttgtgatgggggccagcttggcaggtgtccggattaaccgtgtgtccggttaaaagttagacttgtacggtgaacttggatccactttcagaattggtcactagcgtgaaccatttaaaaaggccgaatgatacagtccctgactccttcatctgcaacacctgttcaaaaactggcgtccaacgttgccatccatgagagacgactacactgagtgggaacgcttctcccatccggacccggacgaggaagaccctccgactctggacgaagttcaaaccctgcgagaatttgccgagaccttcggcacagccaatgccattgcagcagaggatgctgctcgccaactaatgtcgctcgtcgacgagggccgcgtggtcgaggagcgccagaacaacgtcgtggacaaaggcgaacgtgtctcctggttattatgggatgctgctatcgacatgacgcgctaccagcctgctattctcaagttaattgaggcgatccgcgcgctgcctcagctggaacgaaccgaggagcagatccgcaccggctgtttcgaggaccgactagaaacctggaggtccttggaggcattcgattacatttggtcggagacatactcccgtgagtggccctttttttttcttctcccgcccctaacagaccaacgctgtgcagtccggtttctttgctcccgtggcataacggcttgaaatttcggagatatccgcctgcacatcctcctgcccttcatagagttcctcctaggcagctgatctcatgtcacgaagtgtgggccctatactaatccttttcatccaaggctgttgggagatgagatacggcccatatccctattacgggtggactgaattccacagcgccaacgctttttatgcgcactttcttgccgcttatcctcccgaatctcccgatctcagggagttaaccgtggcattgcgactgatcgtattcgccctcgagcaggatccgtggacccatgcccaacaacctccgccgcagtggcaaggccaccgctatcgggacactggtcgccctactgattatatgcaaatgctgaatgtgagtgggaatgaaaggccatgatggcatttgtgatgattgacttgcatattttaggctgatgtgcacgctatggttccattttttgagattgccgggcacattatcttcgggtttgtggggaaaagagacctttctctcctcgaaaaattaaaaaagagggattccaatctatggcacggagactcattgttctcattggaaagatgggaattttggaaaacgcggttgcgatggataagtgagcaagatgagctgatggaaagaacgcgagcggacgcccgaaagattgtgcaactcatgcaaggaatcgagcaacagaatcgagagatacgcttggggagtcaagattagcataaagataccagaaataaggacttccttcgtcgtctattctgatcagctcatcggcccacttcatctgaataattagttaacgtaattcactagtgagttggccacacccccgagttggccaccccacctaacctgtcaattttaaaggccattgattcgtcccaaccgtttattattacccgatcagcgttagccagaggatccgagctagcatcaaaattagccatagccatgcgtgccgaggtttccgcgctaggcaggggttgaattccaaatccattagcgcaatcaatagtataacccccgtatctcttgttcacagcccttaagactggaaggcgtgatggatgaagtcagtatatcagtggtagatccagaagatcatgtcacatggactgtgcgctatgcatgccatgggacgtaagaagctcacgtcccgtcccgacaagggccggggtgcgccctcgagcaggatccgtggacccatgcccaacaacctccgccgcagtggcaaggccaccgctatcgggacactggtcgccctactgattatatgcaaatgctgaatgtgagtgggaatgaaaggccatgatggcatttgtgatgattgacttgcatattttaggctgatgtgcacgctatggttccattttttgagattgccgggcacattatcttcgggtttgtggggaaaagagacctttctctcctcgaaaaattaaaaaagagggattccaatctatggcacggagactcattgttctcattggaaagatgggaattttggaaaacgcggttgcgatggataagtgagcaagatgagctgatggaaagaacgcgagcggacgcccgaaagattgtgcaactcatgcaaggaatcgagcaacagaatcgagagatacgcttggggagtcaagattagcataaagataccagaaataaggacttccttcgtcgtctattctgatcagctcatcggcccacttcatctgaataattagttaacgtaattcactagtgagttggccacacccccgagttggccaccccacctaacctgtcaattttaaaggccattgattcgtcccaaccgtttattattacccgatcagcgttagccagaggatccgagctagcatcaaaattagccatagccatgcgtgccgaggtttccgcgctaggcaggggttggattccaaatccattagcgcaatcaatagtataacccccgtttctcttgctcacagcccttaaggctggaaggcgtgattgttgaagtcagtatatcagtggtagatccaggagatcatgtcgcatggactgtgcgctatgcatgccatgggacgtaagaagctcacgttccgtgccgacaggggccgggctgcggcccggtttcgatcgctttgttcttggcgcagtgaggaactagtccaaatgtggttaggaaaaagtggtttaaaaaaaggataataaaaagaataatacctaacccaggaagtatcgacgtgccaatatgcatcaacccaatcttgcaagtgtcctttacttccccagtgccattctaatctgacttcttatgtggaggataatccacgaacagcaccctgggaactgaaggctacctggcctgatgaaaacagcggtgttcaatccagtctgaaccacggtcgcatgcagatcacccggcttatacgcaattggaaaagatacgtttagagtgcaaaaagcgttgcgatttgcccggggaaagctcaatgtgctccaccatactgcggatcgggccctggtttggtttccggagggttcccctgaatccgatggccaaaattgcgtcaattgttctatatcgggcagggacatactgagacggagtacattctgaaaatcctatttccttcaatcaactgagcaatttcaaattaccatattcatattattatcgcataacaggcggctatagtctcacctagtagcatccctcaatcgagataacctccacacaagctctccaacgtcccgccattggcttcaaaaggacgatttgcggatcttccaggtcggcgcaaagtgctgatcaatgaccggctctgatcggctcataaatctgcccaagcacaatggcagtagttcagcgagatcgtgacacttggactacgcgatgcctaatgccccgtgagccagacactagactcaacctagcttaagtcgaaaagcctaggccatcggggttacgagggttcccctgaatccggcggccaagattgcgtcaattgttctatgtcgggcagggacatactgagacgacggagtacattctggaaatcccattttcttcaatcaactgagcaatttcaaattaccatattcatatcattatcgcataacaggcggctatagtctcacctagtagcatccctcaatcgagatgactccacacaagctctccaacatcccgccattggcctcaaaaggaggatttgcggatcttccaggccggcacaaagtcctgtccaatgaccggctctgatcggctcataaatctgcccaagcgcaatggcggtagttcagcgagatcgtgacacatggactacgcgccatgcctaatgctccgtgagccagacactagactcaacctagcttaagtcgaaaagccaggcgatcgggattacgtatgcacaacctgataaagtgtcagaataatcacatagtcgccgttttgcgaacttgtcgatacttcaaacgaagcactagtcaaaaataagtactataaacgagtgtattatggatgagggggaatttgattttcagcctaccgtcggactagcgtccaacaatgtcggctaatggcaggcatctctacagcttgaaacacaagacacgaaaccgatcttccgcgctaatacatcctaattcggagggccaccataatctccgccaaagggccgttggccggatgagattaaatagagaattgtataagcttgatctgcgcgacctaagggaagagagtatgaccgtgcaatctccggtctggtatatcgaatactagactatacctatctaggtggcgttatatatactatataggtcacagactacatagatgatgatatttgctgattcatgccctctagctagataaacaaccccgtaatacctccataatagtacacttcctctataaaccaactcaacttctagtatcttcaaaactagggtatatattggctagctgtcaggagcggttggtggttggcttgtgttagcgcttgttgattggtcaacggaagtgaatagctttaaagtgagttagtactaagcgaacccatctggccgttatacaccggctaggaaggttgtagtatatcagaagcagggaagccagtaaatgtaagcttatttttctctgcggttttctctacctctatcttcttctccagctagctctacatatattaaaaattaccgctgacctccagtagtatgggtaacagattattactagctgtattaccaacctatatagcgttgagttattattattttagactagatatttggaacttaagtatttaaatcctagccagattctggtcattagtatcactcagctagcaaatctttgccatagcttaggtttttcctacctctagtcactgtactaattataggagctcatcccgctctctattagcgtccttaaaaccctataagtatcgtcgataaataacactctagtacttttgtttagaggtctttactactagtaaagggctttagattctacactcgggtaagtccttactttaacgagatcagtaattaccggacgtaccaatagtatatagagggatataccttaggtacctggcagagggccactataaccagtagtaggacagtattgagtccgtttcagagcagtatctgactcggaactgccataaccagtatcagctagggcttcggatatcgtcctacaggaaggtatatcgagcgttagcacaccgaaaggggtgtctttataagatagagtaagtttagcattaaccgttcaggtagacaatgttagctcttataggtctccggcgtatacgctagtagctagaacgttttagagttagtcccctgccgcttaatctacaccgtaggattataaggttagcagatcggatacctagtcattagtctataacataataaccggctcgcaataatagttatcctgtaatttctacactatggttacattaagggtcggtagtcagccgttaaccattacttaaccagtaggtttctcaataataaacttactttattatctataattctacagttaggttttaaacattatcacgacagcgtactctttctattagtaggtagcacttattcacatatccaataaacattatcgttagaatcagatcccagtctcatttaaactacctaagctttactagaccatgcaatttcgctaagtacccaaccaccgctatctgtatatattagtaatctacctagtcttttcggttactctagacggtatactttagcccagacttcctgccgctaagtactcgaaaagctctattagacagcgcgtatcgcgctaagtaggaactggtagtggttaatttccggtttactcactcctcccgatatatcaagcagtctatcaataatcgccaatctatagtagggtatacgccataagatatttgcggcaacagtagtggatcatacgccgatctacgttcgtaaaaaggtaggttttaggtaatctgtgaataaagagtctgattcattggacctcataagctactctatatttgaaccagtcgcgactcaatagtgccgccacttaaccagatatcgagaatatattatgggttaatatagatttatccctgttatataatttccgtgttcctattattagaaattatataccggggtacgcgatttggctcagtctcaaccgtatggcatgcgttaagtctgtcacatgcaatactggccctgtcggccttcccttacgggtttagcatttatcgttctttccgttatcgcaaaggccaggttcccttagtctttaagctggctgtgtttactcgccgtcagctaagggtatgctatcagtttggcgtacatagcggtttctctgtgaaaatgtgaaaacgttttacgagtcttgggttaacagtatatactactccaatcttctttaccatttccgtcctagctggtaaataggcatattagggttagagagcacgaaaagtcttactatagtcataggcgggaggtatataaggcaccaggtgatttcatcattacattacacaatatagacctcgggttctccctaccgtttcaaacttggcccagttaaccgtatatagtctaaaagagttcaaacagaccgtttaagacccgtaagatataagcccattcgaagtccaaggaaactctagttagagactaaatattaatatagagctatatatataagcctaacctccgttactcgagtatgcttcctagtgcttccgtcagacctatctcctcgtaactccgattaagatacaacttagtgcctatctttattctaatagaatggattctatagtaggcttactagacccctttcaagctccatctaactctataataggaatatcttcgactcctcgcgaggctcaacagtcgggcagtccaggtagaacgagcctagaccaaacttgaacaagaattaagcgcctctagggctaccgagaatcaagcgatagaggagctgggccatatatccagattagccgatattttctttaaactcagtcaaattctaggcagcgtagtagattattagctaaaggagtgtggaactaaagaacccagctaagagccagagttaataaaggtcatacttgatatcttattaaaacagttagaagtacaggagttagctaatagcggtagaaattccgataatacctcgaaagcggtgatataaaggcagcggtatagtacagctaagttatagctaaaccagagcttaccgtacatcgttccttatttatatacattagttattacttataaaatgactgggtttatttacagcttagtcgtatgtagaaccgttataatattcttttatctactttactatagccgttcaaatggattcgtttctacatctgcctatatatatgccgttatattcttagttcagtttagaatacctctttccttaaagctactacaattatatttcaatttatactaattatagaaactaacagattttctgttatacttagaagctaacgcgagagctttaatatattctagaagacaacccttctaattatactattactgaatcgctacccccgacttaatctactactagactagaaaatgtattcaaataggaccacattcgataatcggtagctctatcgctagaattaatttctaaggaattctagaagtagaagatacaaccagatagctctaagctcgatatataagtctaatatagatatctctcttatattaatactaaatcatatagcagagggctattattaagatagtaaaggggctactccttaataaactaatatatatactagttattagtaggaagttggaatataggacaaaaaggcaagataggtatagcagagtggggggtatcatggtttattttcattcgtagtcagcggtcctactagaagataataaggcattattaggctaaatggttataataaaaagttctattaacgtaccggccgctactattcatactatatagggagtatatttattgagagttattatcgatttcttatagcatataaaaaccggtaatcaaatggtatatactaactgtttgtacctactatataggatatactagtcggccagccgtttaccggtaaagcagactagtggtacccatcttactgagtttaggtagcttcctctgtttaactggcctaggcgtataactagtccatccatctttaggcgtactttttagttcagggaatgacgcctgcattcagcgcatagcatataccttgcggcttttaagagtcctattacaggtgaataaccggtagggagatcttagaacatcttgagacatatcgctccatctatccgtgaatccttagacacaggattttaataacaggctccattatcttcaacccatcggcactttaaataatatatgggatcgccaataatttggccgaggagtgactgaagatagtcagagctccagtacatatttgactgctgatttgcaactgtcggcaagaatgcggtccatcaaggggcaatgtacccgccgaacaatttcctattgtagtagcacatctgctatgtagggctcaaatgcaggagagactctgcctcccacccaagaggatggagcttgaacgtgggattataacccttaaacagtgatctcatcatctcaatttggggttcatcggaagcaggcacagagcatgacttcagaatgtcaatacagtacacggcaagctagcaccttagtttccatactcacatgcgtacgcttggctaagttgctaccatcattacaggagggtgccgggtattattccgcctttgatcggtatccgcgaatggttcgaagaagagagagcaagtattatcgttttatgactctatacatttttattgccgggctcgtgagattgaagagtagttgtacaccgcagatttctacataccggcttagacttttatgcagaggttttcgcaatgacaacatttcccagctggtgcaatcaacttttctcatcgctagaaagtggaccgcctaaggcgcaaaatagtgcgcgctggggtttgtttgctaaatcgttctataggagagtgctctcggatgcattgaggaaatgctgtatatgaccaagatttacatctaaacgctcctcgattagccttcaacgctcgctaaagtcttaatcactcttaaccagctcttcttaaccactcttcttaaccgctcttcttaaccactcttcttaaccactcttcttaaccactcctcttaaccactcatcttaaccacccttcttaaccactctttactacagccaaaataaagagaattgctaactcgcgatatttggttttctagaatacctaagcaaatggtcgccgtttttgtctataatgataatggtatttctaagtttataacccataggacctatccttggcaagagaccaactatacaggtatatctgttttattctttaaggttaccagaaggaccgcgtgacctctaatcgccaaagccataggtatatatagacttgatatatagatagagcgaaaaatagagtaattatcattccctctaaactaaaaggaacttactaactactagtatcgtagatactttattcaagtaggaccatacctatatagtaggagttttcatttagaagtagaaagcaggaccttaagagtaatagatatcattaagacagtaaaccctctatataatagccttacccaccatatagtatctagaaaatctaaacttataccgataaggccggtctagaaccctataaaaccattaagtagtcgtatagttcgataattacctatcccctaaaagctaatataaaaggccaaagcgatttagtgccttaagtaccatatacttatactataggagtaatttagtgattactatatagcagtgtatcctttctagcttaggtagtattagcacaaccctatagcactactaatcccctagactagggataagctctttaactctattcttagtagctattactagagaataacgagcagtaggtaataggccatagtgaaaaatctactactacagtattatattatacccagagaacccaatcgctatatatatacttaaagagtaatatagtattaattaaaatatctttctataaagtagctaggccctaaaagttttatagataaactataatatacctatagttacattccttagtaatagtatataccatttagctattcgaatcttttagtcgcttttttatactatacctattagctaatagctatataaccttataatacctactagctatagcctattagaaagaagttctcccctagttgtctactatatttatatttatattaggatattctaataatattttgataattttaaccctacctagagctaatataaatattagtatagtaaaggaaaagtaatagttttagttattaattagcaaagatttttcggaactaactaggagatagataatatcgatatactctataattattataaccttaagtagtaatattcctaatagacttatttagttaatattggctaaattctataagagaaatttaaccgctataaactatcctatataatatattaactagagtagtagagatatattagtaaattaagggctcttataaagccctagctattagaagaggactttaattaagtctaaggagctattcgcaatagcctttactaaaggtatctagcctagcttatcggcacaattgaaatctagatttatttactataagaggaatttaactaattttatattagaattacttactatatactatattatagtatatctattcttatcttagtaattaaggttaatatatagacttaaaagtaaggctttaataataagcagcctttttttaatagggaggaaacggctatatcctttaataactagaagtaacagagtttcctatcgatagttaaaatagttaacattaactcaaggattttatataagtatttagattactctatagtcgctaatctctattactaggtatagtggtatttagctataatagtcgtagatattaatatttattcacttattagataaaagaagttagaagatataagtttagcgataggttagtgtaattaaaataggtgtaatcctatctagtgattagttattaagattaatattcactatattaaggagccgttcgataatactaacgcttctatatagaatagcgatcgagaaagtactttctcctaaagtattatactatataatatttactaaataatagcttaagagtaaactaatagcttctaagtaccgtaactttatagctaatataagcggtataaggctagaaaacttttagttaatatctgccttttcctaacctagaaagtattagataatacctaagcttctatatttaattgcctaataaattagcgggatatcttaaaagtctatataattaataaggctcttactaaagacgatataggatttccaagatataagatatagacttcgaaggtctttcttatcgatagatttaccaatctatagaagtagttctagtagaagtcctaaaagcggtatctcagcagattatatgaatgtataggtaacgactacctatacagataataataaaaggagggctcagagtaataatttagagatcaagtttgctactacaagtggttggcggaggagcttaggaggcgcatttctttatggtactggcttctatttaactatttttgagggcatattattgcagccagtacactaaataacgatatcaccgacacagagttacctaaaagtattgagttaccagctcctaggattatactacttgctcctgggatcctgcgactggtttctaggagccctaagaatcccgggagacagctatagtgttcccaggaaacactcaccgattcctaggagttatgcatcgtacctgagactctaatataacggacatacgaaaaccgagtcacctaactcctacgatctctgtttcttgtctcagggccaagtggcgccatcgtgaccaacatacaaaggtcaagcgcctcgccagccatattacaacctcctccaacccacaagtgtaccatcttccagttacatccaatattagcatttctcgagcattcaactttgctctaatcttttaacggctcccacttccacggattctatcctatcattttcgttcaagaaacaaacaatgggccaatactggctagtggtttgcccgtccaatcgcgagtacacaacacagtcatttggagggaagttatcagagttgctcttttcgtcgtggtccaacatactacgtgacctgattgaaaacgagtgggctggcactcagctcatctgtattggggattacttaaatccagacgacctccctgccacgattcaacaagacaagttccacctgagttccgctgagagcggtgcaacatccgagcccctccgctacgatgtcgttaagaaaacgtttggattttggtcttacgaagaagagaaagcagcgactctcacggtcatggaaaaaccttccaatcccaaaagtcgagtcctgaggaacttaactaccggtaaatatttctttgaggacgcgttgccatttagaatcaccattggccacatagttctgatgagtatctgttggtcgtcggaaagttcaataggcattacgggcggagcatatctggccaagggagtctgggctggccacaagttcgacattgtagatgccgacatggtggaacatatgaacagacaatgggaagatgtcaccgaggacgtcctcgatgaggttcaggctctgtggccgagcgatttcggacataactcggaaactgaatggagagtttaacacgtcctgggcaagaagctatgaaatcacttgacgtaaaagatatccggggatataatcctaggctaccaaacaaattgccaataagaatatctttggacacccttcccgtgatactgtacgaacaggtgtggcctgtgcgaccttcaaatccctgagtttctctaagcacaacgcttcaatcgattgcctactcgaatttactcgtcataactagccgagggaatgtatggaaaattattattcgaacgataagagtagaagttcattcagtagtaaggctttaaatttagacaagaagtttcaattcgcctggatagagtgctcgactgagtgcacctttaacttgcttcatagggtcatgtttcacagagagtaacccaaccagcaataatccctgcgctgaattcgtctgttccgaattctggagtattaaccccaccttcaggtaggacaagaaggccgtctccgggcacccagtgaggttcctgggtactaataagttcctggggccgcacagtagcctcctggcagtgcatgttatcatcctaggacgagcaagtttctacgtaaccacgttaaattagtggtcgacccacccttttttcaaggattttgtccgcagaccaactatagaatttgcaattccgttttaaacaagtgactgaagttgaaggttgctttcgatatgagtgctatgaggtttgatctaggcaacgttttctttataaggctattttatactcatatatataacatcattgagaagttacaaggatgattgaaatagcagatctcagaagaaatacatatcaaaacatacatggtacgttacattacctcttcataattacttactaagttctcttcttcatctatggcggtgcggaccatataactgtaatgtaactatttgtttcattgtaacaagctggctgtactaagttttcgcaagaacagccaagagttgctcgtgttattagccccaaacggtcttctttgcccagtaaagctatgttccggatagatctaatgaaatgccactggaaataaatcgattataatataaaggtatatccgcgagcccacctaaaaagacacttatcatgcttcagatttactacgcttaaagtatagggttttgccccttgagtttaatataccaaatttactccttatagacaagtatagtttagcaggtatctaagcgatccatttattaaataatcccttattctcgcacagccaaagagttccaatagtgcgataaggagtctagggtttaaaggtcggcagagggtcggactaccagctgatagtaaatttatacagataaagtaaaattccagtatatataaatattattaactaaagaaataatttagttaccgttccaattagcccaagatctagtatatctctaagaaggcttcaattccatccatacctatcgcagtaacgccatattaatatccgcgaaataaggcctaatctatcttagggtcaaattcttcctctgtaggtcatataacttctatttattctttgcgttaagcctcttaggggggttatagctatctagactacctaaataatactaaagcgactgggtttgtgccttagctctagtaaggggtctataagggctactaggagggacttagttattataaggcagattttacttactatcttcctataaaggtagattactatcacagctaaattctatggtaatagcttagtcataagtaggtaaagaggtaagatattcttacaaatttttcctctccttattagctttagtaatagtatagtatctagaaggctaactagtaaagcttagagtaggaggttgcggctattttatactactaatagaagttaccttatattctttatatagggaaataagtgattctagctaaatagtagcttaatcataagattggtgtatattatcactattaaatttaggcagctcgaggatttaaggattaatagccttaaggctaagagttattagccctaagctaagtaaggaaactaactctaagaagtatggttctactaagttactcctattactaatactatatttattataaatactttatcctaagtattattctagattccctttaatagataggagtaaggctaggataggaaaagaagacccttctagtatatagtccttatacttataacttagatataagtaatagtaaaatcgagatttcttagaatatcccttttatagacctattaaagatatttaggcttctaacttataagtacactttctcttactaggtagctttagattttactatatagtttccttaagcctatatatattatataagtaaagttagaggttatacttattatagaagctttaggaatatctatatattagctttatctaataatacctaattttagctaagtactgtcttttaatatattcccttagattattactttatagctagtattataaatacttttctatagagagatcggggtcctataaatagaaggggtagtagctaagacagataatagtataacgatagataattactttatagtattaggctttctaggactagagataggtattataataatcccgctattaacttaataaatactagtctatatatttatagtaaaactgtatctctaactctaatatttaaaggctaaatactttcttataccgaatatatctataaatataagcacttctattatattttcttaggctagtagagttagtatccactaggttattattaggttagggagcttaccttataatattaatttaataaccttttataggatagaggccttatactaggcttttatttaggagatatactatattaaaatcacagagatactatatctatagatcttcgataaagagaagttttttattaaaggaaagctctttagtagaggatatagctgttataattcgtataaccttaggtataattagtatttaagtatatatataaatattattttccgaatatattagctcttcttttctttaattaataactttccggtctcttttctcctatacctactgaatttaatattacttaagtttaaaaaggcgatattaaataagtgcctttctatattctaacttcttattcttaaggtaattcttattatagttctatataaataaatcgatctaggctcttatttctactatatctagtttttctaaaatactctctttaatctctactagtaacttacctagtaagctatatttataatattaaatataaccttagaagtactcgatatagttagactagtcttccttatctagaatagctcctactatatctatagaagaatagtaggcttaataatactttagaaaagtatttagcccctaatatactagtatctaactaataggtatagagccgtttctctctataataaaacttagtattaagatctctcccttatatctattatatttatatagtatagggggcttactttcgacttttttcctaaggttttattatatataatagattattactaatttactaaagtaccctatagtagtaaaaatttgatataggtaagaacaaaatttttattttattagaggtatctcctaaggcccgtccactataatatatctaagaactagtttatccaagtattcttccttctattataaccgaatcttactatttaaaagattaaactatactagattatctatagtatctaccctataaatagtattatatactaatataagggagagaagaatatagcctaatataaattgcggcctatttctatcctaaatactaattctaaatctagaagtactaattagtaaagtcctatatatttaataaatatactactatatccttctaacttatactatatattttttatattaataatttttaagctatttctaatctaccttctaacctactgcctaataacctatagataaaggaaatagaactaacttaatatactagaataaagattaatattatataatatcgctagagtaaagataccttactttatatcgaagacctcttttatatttatccttactagagggtataaaagctctaactcttactctagtaaagagatacagctagagagtaaataagataataactttaagtagtcctagaataaatgtttagtagttagtctactataaagataagactattcttaaaaaatcttactttataaagttaagtttctctttcttttaacctataacgatactatctatagttaaatttttttaatctactatatctaggtaagtttaagataatcttagagaggaagttataaataaaccaactatttttatttcctttcgattatctaggataattttagttcttataaattatttaaatctactaaagaatttctcggtatatatacttacagttcttactgtaggtagactattatcatttagtcgcccttaaatagaatttacgtactagtaaatatatactttaattatcttatatattagagtaggagaactaagggaagttttataatatttatacctattctctagatctatagtaaacctaaaggaaggttagaatatataaataggaaaggattactacttagatactatataacttactcgagctaaaggtttatagtttctcagtataattcgttagttttagggagccttttatctttctcctaaattaagtcctcctctttataggttctaggggtataaccattcttttcctactatagatagtacctctctttcacaagtttatcgcacttagtaaaaaaatcctttcggcctataattaatataaaagacgcttagatagaagatttgttaattattatatactaataccactatatggtttacttttatatctaagatcttaagctcgagccgctctaaagaagaaagatataagtaatattataaaatagataggttctctactccgtcctataccctttagtcatgatatatctccttgataagatatagtactccaaaaattgagggtagtaataatgctattaacgaactaactattatagtatagataaccctataggggctaatcccttctaggtatagtctgcggtaggctgagtgcatcagtattactcactgattagatactgagtatcactgagtaatcagggagcacctaatgagcacttactgagcacttactgagcatcagtcattctgtacgtgactgatctgagcatgatcactgatctgagcctgtactgacgtctactcagtgagcctgagcctaagcaccctcataaaagcggcggcagatcaaataggaaatccccatacgccagggaaaatccggtacgtataggtgcatacgtgaagttgacaattgaagtgctggtaccattgggggtggtaacgctcactcgtacggtgccggctgtgttagctggcactacgacggagacagttgttgcggtggacgaagtgggaacggcggtcacagtcccaaatgtgacggtggtggctccagcaagattggttcctgaaattatcgctgttataccaccggtagtcggccccgaagtggggttgatcctggagattgtaggcaaggacatttcgtgtcgctagtatcggtgctgggtttcaaagattgattgttataaatcactgtttgttcgacttgatcagttttcaaacctggagaaggagttgccgtgctttaagtatggctgttctcagcccaagtcgcattattgaggccattgtcacaagatatggcgtcgttcgatagtcacaaggtagcgtcaattgtttgtggtcatatgcattcttgacgatcctcaaggttgcttgaggtgtgtgcaaggtggttcaagtgttgatcaggtggaggtattcagagagatgtgggttccgcagcatcgactattccatctaggcccattcgacttgtcttggtatgttggtcgaatggtgcacagaatagaaagtgttatgtaattgtttgccactttgaggtcaagaattgtttgatatcactattggtacggagatttgcgtagcggacatcaatgaggcgtatgcgtagtggtataggtgcctgccatgcaaaaaaaaaaccccttttttaggtagtattgatgcttgaatgcctgaattaggtactattacagaggccttgatgggctaggtctgttagttgatcctctcaaatatgaaaatgaaacttttaatactatataaattcttgtatcacctggcaagttttaatatagactaggggccgggcctagttaatccgtaccgaaaatagagtaaacaacccaaaaagtggtgatacataaatctgtatggcgtcaaaagcttcattttgacatatgcggtgtaagacgcgggcttggttctagcgataatcaggcattcaggcatcaatactacctaaaacaggcacctatagctctctctctctcgggcacggacaccaccacagccacacgatatcttgtgatctttccccatgtttaaccccaggatggtcaatattccccgttcattttgtcttattgtccgcttttctggattgtgtatacgcactaatgtgttgtgactctgaagtcttttcaactgcttggtctcagagagattggtgaaactgctatcccaaaaataccccgatatacctcctggtctagtcgacctgttttccaagcgaatgaccgcgccaaaaggtcatttttacctttcgggatcatttctcctcccgattgaagagcaaatacagttcttgtcctagttgtttgaaggtaccttgtatcaatgcctccacacgccctccagtataaataacggatcagtatcaaaggatatctcaagagacgaagaaacccacgtaatcacaagcgcaggcacgaatgtagtcgatgcgaaacatcttgttcctcaagaaaatgatgaaaggattaccatagtccagaagaagaagcttagagaggagaaatatcttggttgggcggaagtgaacaaacgattcagtcagctggacactgcaaggttacatagtgttagtacgatgtttcacggtgtctatataagcttagatttcgatacttttggcgaaattatagttcagtcttcgatctttcttttgacccgtagcattctagatcttccacatgttcaagttatatatcttgtaatagtaatttattttctttattatatgacccataaaatcaatcgccctaaagtgattcgctgaacttatttagccgaaattagcctcagaaaatctccttgatagccaaaaaaatacgagatttagacctacttgaaggtagcttctcaagtctactttcgcttctattgcgatttatgccgagatctgcttaagttagtgaaaccagcgcctatgaatctaatctttagagtgctgtgtcacttcaaggttacatagtgttagtccgacatttcacgatgatgtggttttgaatagtaatagtgtaacgtggtggtactataaatccataaaaggacatcaaccgtcaagcaaaatcttggtcccagatctagttgtcttgtcgttggctaccttcgtgtattccaatgcgtctggttattcttaccatcctgtgtgctgtagcaaaagctgccttttctacagcacctaaagacaatctcaatgccctgcctaccggattatctgatagtgcaccatccggctcttcccctggccaatttgatggaatagatatccaaatcgacacaccaaaattcaatttatcaagcgatgacctcctggttcagcttgccagagactcgaatgaagttagcggagattctgaccctaacttcgaggcaacccagttctatatgtgctgtcagcaaaccaatacctcggccgtcatcgataactactatccaccgtatgcgtgtatattcggacctagcacgggtgtatgtcctcaagtcaattcttcatttccatttccatggctgtgcactctccctgagtggtgggttggtagctttgtgagtatataccatacactatatcagcacatcatgataacgcgtctccctgacaattctacgcagaactgttcataccagccttagctgaccttgatactacacccatattgactatcatgtgcatggtcgaaccgagacataagtggaacattctgtcatccgtgatgtcttggttatttacaatgcacagtctgccatcgaagctgctaaatatatgtcgaccagcaagccccacttctatacagtcatttcgttccctggctttatgtatttagtcagtaaccaccttactatcaatataacatgtagtaggttagttagttacttgagcaagcactcatttggtaaacagtctaaatcactactggcaaagtcctctaacctaattaggataggtaaaatgggacctccgaaatattattgggccagactaatggtcctagatagaccgcctttctataccgcctttctgttaaatatactgccaacctcgacaggctaggttatcttgaaattcttttacaaaaaaatacggaccgatttctacacaataaggggtcaacattgcctctgatcattcctcataaatccagtcactatcatcgtcactagaataccccccagtattcgcatcatcatgactatcatcactactgctcacaatctcgttttcctttctcggtttccttttcgtcaagactcgaaacctttttctgacagcttctagatgctgctggagctttggatcttcacagaaaatcccgatgacaacccctactctgtatatttcttggatctccgcaatcatcatatccatctttcctttcatgcaatttctcggccgtccttttggttttcggcgtttcaagtgaccgaaaggcgtgtatacttgactgtttgcggtagcggatttagatggctggataaatgtaagccgatgaacagatattgcctaggaacggcacaacaccacaaagactacgtcaaggaagcaaacgaaacgaggtatcagtacctttcggggcccagagaatgtcctgggttgtgcatattgcacgccgcgaggctgagccgccttcgaagcactctggctttgaggttgaggttgaggagcccgaccaagttctttcggcaagtttggctcgtataattgccctgtctgaacaagaggcgaacaattattcatggagaactggccactgcctggatcgctcatgaacggccgagaggtatggagactagggctcgctgcgtcactcgaaagtcctgcacccgttccagtagtgtcgttcttcgcaggagagatacacaacccttgtttaggcattgttagaggacccccagggatatcgaaccaaattggttgtttgtctggaggctgtggaatggaatctattgtgggactcccagaagaccgaacagcatcgctatcccatagcattgagaacccagatgtgtccatagtgcttgttagatctgttctaggaaccggacctaaacccgaggaagcatttggagacatgggcatgaactcgaatggagtcatgaaaattccatctggcgcgatagtctgctgcggacctggcaatgcagttccttggatatccttctgaggcctattccgaatacgatcccctgtttaggttaggatctattgccatggaatacatatgatgaaactcaaccgcggaacaacatactgaatcgacgctgacattccctattttgtcgtctcctcttttcgagcttgtctccatccgtccctgtatcgtgcattctggtgctgctcaactcaaaacttaaggcccgtttctctcaaggattttgtgggtgtctgagagcattcccgatgagcggggatatgtccatattaaattcctcccaggagacaaggtatctaatggaattagcttcttagtctgtaatgatctgcctatccacctcgcaagtcacctaattggtgcctctaaagcggggttcaataatccggctcgattcttctgtgccattattgcgtactgtctggatatttcttacaacagtctatatcgggattcggtgggaatcacttacctccagccatatttgacatttttttgcattaacagcctggtcgaccataaattatgtcttccaacaactgagctgtaaatagttgagcaaaaacgagtgtagctgacgtatgacttatttctgccctggtagtagtggctagccctgccgccggagatgacggagactgtcactctagtcacgccatgaacttgagtgaatgttttgttttgttttgaatagattaatcacattctacgagtcatgagctgaattagaactcccaactatgaccagggaccagggaccagggttgcacagttgtatggatatggtttagctcgactattgagtggtaagtgacttttagtcaaaaaaaaagaacattggaactaaagcgcgaccccggtcttacgggcgtttggtttgaattctgctatgagctaatactataggaaagttgttctaagattgaattcatgttcaggcttacagctcgtaggatcagccacagattgaatatagtagacaagataaatgtaacagaatgaacaaatagcgtccgaggtataccggcctaccaaaatcaaatattcagccgtaaaagcacgcgacgggattcatccggactccggtcctaatctaacctactcaaaagctattcaaattggacgtacttaggtcgagtggagcttggtccggcggccccgcgcacgggccccataatcgtgtggaaaaatatggtttggtgcctacacctcgtcttcgccttaggtgaacggttacggcattcccaaaaatggtctgatgcaatgtgaatgaagatgaagatagctaatagtgattttgattgaaatgcggaggaacaactgactccgtactcttcctcgaaacacgcactcggatagataggtctaggctttgttccttgattagcgcacacaggttgtctgcgaattataaactggctgataatcttaactaactaggtactagaaggtaaaccgactgttggaacggggcactacatgcaactaactaaccggccccttgaaattcttttaccaaaaatacggaccctcgcatgcggggtctgccacccatcatgacccatgtagtggggagcaaccagaaggaggttacctacgcgcccagcatagaatatcaactctcaaggcgtccctgaaacttagactcaaattttgataatgcattaggatatcgtagaatattagtgccgtacttacaatgaaagatcttaatgtgagaaaaatgagcatttagaccctaccagaactcgaccaatgtatgcacgcctcaagccacagcttggcagtaataacaataccaggcattatcaaatatactgctagtatataccggcttccaaattaggaggttgagagcacctaattttcaacttccgggggatcccaacctgattgcggagcgaagcgacgtacgtacgtacatgtcacgtggccaagttttctcagggggccagaaataatagcgttctaatgggccatcatgtgatcgtcagtcgcttcgctctgcaacgactatctcgcaggccgtcgagatcactcgtaacatcatattaaaatcaatgtatggatttgtgaaaatactgttttttatttggtggcatgcatgcattagtgaagttctccgccgggctgtcgtggtagggtatgtatcttttgtatggtctgtctatgttgtacggagtagtaaagatacacctcgcttgtgagagtccgtatttttggtaaagaaggttcaaggggcccggcgagagagaggaatggtgaattacttactccgtactccgtactccagttatgtattaggaataagtccgcttcctgagtttctagtactgccgtcccgattgggtgcgacgagcagtactccgtacagagttttctgtcatattctgcccacttccggcttacatagtagaaagaaatgcatttttaatggcgatgactacgaagtgtcttaatgagagaaacaacttgcgtagtattcgactgatgatggcggacaaggagaggaggaaaaggtacctaatctagatatgggatctggacccacttggtgtccgccttgctggacacccaacaattttgatcagaaaaaatcggatactttacttgattcctataggacttaaccccttgataatgaagcagttaacgatgaagtctttgacgataaagcagttgatgtgataaaagcgatctagttttgactaccccacccatacatatcaacgggaccctaccgccatatctcaaccaatcccccggtgacaacataaacattccaatttgttggacatggtggtcacctgaccatcagcccggtgcggcagaccccaacccccataactagatagtcgggcattctgccctttaggaattgacaactctctccctctttcatcgcatcactacaatagttatatcaattgttattgtgcgcttctaatattattggaactacccccgagagaagcgagattatccccttttgtacataaaagcctataacccatatagcttgtagactttgagagcaactttgaatcgtgacttttcttcagatgaatcattgaccttcttcagatataacaaagtcagataggatagaacaaagtaagcaatcaatgatatcattaaaataaggaacacatatattccaacaggaggttaattcagagcgagtctttgatagattcaagagttccgcggtcgctgaactcttcgtggtgggcttattatatctaaaacccgttgaggcgatgagcctataactacttctgggcagaactccgtaaagagttgcgtaatcctagggataagatctctatctgtatcctttgtaacttccaggaaccaactaaataagtcggggtttgaaagttgcgaggtctctgcctcgaaaagcgcttggattttgtccccgatatcctgccggatctcagcgatcgagatcatagcgttcatcaccacgccgggaatactacatccctcggatcgacagccctgctgctgtagttcctttggaaggtcacggcataccgagaatgggagtaggcattctgtacagtagggatactgttggcctgccgagatctttgcgctgataaaattgaccagattcaaaacctgctggttgactacctcggcatttgaagaaggacagtcggtgattttatgggaggcttcggcttgcgttttacctctaagacagcatagttcgcaccggtatctttgaagcatagaaagtacgacagtcagggcctcacgtatccgggttagcggttcatcgggttgatcggtaaggggccgtcactgggctcccgagcaatgagaggatggctcaaaatatcgcgagccgccgaattgggtagagtaggtgaggccatgacaggcaatgcgaggagtaaagctccaagccagggaacggctattatcgagatcttcatattgaaattcctttggcaatattgaattcctaagatattctggaacgaagtaggataaataaggctgcaataactctctttggcttttagttgagagtcgaatttgcaaagagttgcaaattatataaagaatgcttcatggcgttacctgggctttggaataaaaatccaatattactgatgactgtggggtgagcgtaatcaatggaaatatcgaattgcgtgctaggggtgacctccaatcttgaaaatggagacttctataagcctgcagatgtattggccaattgggccagccttcatggttgattgattacctgcaagcttatctgcagtctgagctgagctgacctaggccttaatacagtaatcttgaagcggaaagggtatggaggttcaaagggagaggcaccaagattaatcgagggagaaacccaatgattctgtatcagcgcggaatattacccatatattatattttgaaagaaaacaaaaatgggtcgaaagcaggttttgtcgattcccgctgtacggaacctcgctggtctagcggcattcctcattattctattgaatttgttcggcaactacctgttcgggagcctgaaatatactgctcaacgtagccttttgaaagccaaccttgaaccactgaatgaaactctcggggtatgtcactcctaaccacgcttggggatcctcaaaattaccaaaactgcttacacaatattacagttcgaaaggattgcggttgtatcatcgggaacatcttggagactacatggcctcgtcgaggcaaccgaattcaccaatctttacattgacgtgccatcccagcctgtttggacggatactgaagttgacgagtttcgtggttatcgggtccacggccggcatggggagcttggcccaggacaggcacggtgttggttaggccatctgaatatatggcggcaaatgctgttgcaaaagtggtccaccgctttgattatggaggatgacgcagactgggatattgctatcaagcagcagttgcttcgagtcgcacccctcatccaagaagtgacgggagccacggactggtcgtcaccttacggaaactcgtgggacctcctttggcttggccactgcggcgactatatccccttgcaactagcatcatttgtagatgagacgcttccaggatcaccaatgtaccgtgagaatgatgggagattcaccgagtttcctcatcagcagaggatggttcacatgtctgtcggcccgatatgcacatacgcatatgcgctcactgcttcggctgcgtcgaaactctatcaactttccagctccggtatggataaactgatcactacgcatttgcgagaatggtgccaggaaggattcttgaaatgtgtcacggtaaacccggagctctttcaccatcacaaacaggccggtgagatttcaagtgagattggagttgtcgaaggctgggagaatcgatcggcagttgactttacgcctaatatacgatacagtgcgcgatgcagtagcaagaaaaagaggcccgcggcctgccaactcgaatttgatccagtttgatcaagggtgattggcaagcagaatggtacaggttacggttccaaatatagccatgtataaagatgtatttgggtgttcactatctcctatgtagtttgtaggtctctctttcggtctccttaggtctcggtgaggtctcgttaactagttaacgtaatcggtaagcgagtggatcaggcaatgcaacctattgaattcaaatacatttatctcgaccacaacgccattaaattaaataaactataatcattatctatctggacatatctctcttctatgtcctggctgcctatatattccatacgctcgcccggccaggggaggtggtttataacggataaaggtccgtataagaggaaaacatatgtaagcctatataggctcaggaaggaacatctttattattatatatctattctgatatcgatccgtaaggggttcgttatatgaatataggcagatagatttccttatagttctggaccccctaggggccccttcgagactagtaagaatgtaaaggtatacgttatgcaggtgtacggcctgtcaaccgggtaagatacaaagggctttgtagagggaatacaatgtattgatggtatgccaagactaattcttaccagtctcggaggggcccctagggggtcctaaactataaggaaatctatctacctatatttaagaagataaggtagtatataataatttaaagagaaggtaactaataaggtatatactttatattttatacttcttttataagggtagctgttaggactagctaccagtgtatcctgaaaatagaggttcgaattagagtggaggtccctagtgtaggtcatacaattcagtagactaatcgctaaggttctaaatctcatatatacggtatatatatacccctggcgcttacttagtaagtatatcggcctatataggccagttatataagtgaccctcggggtcgtaatattacccccctcctttataagctatatcctcaaagctcttagtatttcctttaagaggtacttctttaaatatatattctttatcttagtatagcgacctctttactagaaaatacattataatagtaactcctaacttcctcttctaccctctactatatctaactataacccttaggtctttactaggaatcctactatagcctagtatatataatatataaatcggattaatactaattatatatatatctatatatcttatataggatcttagctaattaactatttctatagtatatagctagcgcttatataatctatctcctataggcttataccccctaatatacctacccttaggctattactattactagctagatagttatcccttcctttagctcctctactatcttctctataagtccctataccttacctaatatactcctagcagtctattataccctaggtataggctcttatatagaatactattatagcctagatagtaatcctaggatttataggaagtatagtaatataagaaaggaattattaacctttaatcctttaggtaataatatatcctttactataatacttaggccttatttctatatatccttagttaatagcctacttatagtagtagctataatacctctatatactatattatctttaggctatttatactagactcttagtcctatctcttatacctactattatataccttctatattatattcctactaatatataccacttcttatagtatctttatagtcttagcttatcttctttttctttataggttacccccttttagcttttataggtagtcttatatactcttcttttttaaattaatctaatatagtagtttcttctatatatacctaaagttcctatatattcttagtatctctataacctttttatttaactagatactctatccctttatagtagcttttaaggatatattctataatatattctaattctctattaactataatagggtctagcctctcttagcctatctataggttaccttcgaaaggttctaataaagatatatattatataggatatatcctataatacctagatagtaagattaattaataggcttacttccctactattcctataacctagaaaggtcctatatagtagtagtctagtttcttataaggtctccttaagttaatatatatattctttactaggacctagttccctattataaaggttttattaatatacttcttattatataatttctttataacctcttttaacttttctaggtatacccttagatctatttatatttcctctatatctttaatatattatattatatccttataaagatctattaagtcctcttatactaaggtataaaggtctaggttaaagcctaatagagcctttataggtactatacctagaatactataagtagagttattatagataaactatattagtagtagttagtatacctagttatcttagtactaattaatatatccttttaggtagtactctatattctaattttatctttttatttatctatttatctataggtagtaggtagttaataactagtaccttataataaggaagaaatagaataataactagaatttacttataaatactataccttagttatttataaggtttcctagtattctaaagagaggtataatatatttatagaataaggttataagtctatctacttctatatcctttatataaggaatatatagtgagtacttcgtgaatatatcgactataaccataagtatatcgtagaccttatcctaccactttatagggggtaaccctataataaagtcgatacttatctattcggtaggtctctatagtactagtaatagttctagtagactatatggcttatagtagtatactgcgtttagctagtaggtcggatagttatttatatactccctaatagatttatatatatcctactactagtattttattataatagcctcctttatatactaagcttaatagtagcctacttaggggttattatagtaaatatatataatcttagcgattagtataggttcctataggatatagaccttactattatatttaagtagactattatctagccttatactctaggctgtactttctaggtagctaccctagtcctattagtctatctttataagtttcttctatactaaggtatctcttatctataccttatatataaagtcccttatagactcctagggtttaggatagagtaatatcttacctataagggcttccttagcctccttttatattataagtatatatagggagctattagtatcttctatacctaatcctatagctaggtaggtaacttcttatagttcctctactctttagtagatagcttctttaagcttatatataaaccttacctagtgctatttattatatatagaggtttatatatagtctagcctcctacttagtatatcggctaggtttgtagagctagttctaaatataatagtgaagttaaaacttactatatacttagcctatcttacttatctgtaaggtagctccttcgttattataaagttcgttaagtttatataatctatcttaactaagacctagtatatatttcctttaaggaaatgtctctatttttagaaagcttctataatcgctagtatctcttagtctcctactctatagtaggtttcttctaaccttatcttatataagaagaatataattagtttctaaatactactctctttttataactataagtagattactttaattactttacctaatatattagattttactaaggttcttagtagggaattaaagtatataaagagaggggctttttagaaaatctccttaatctcttagaaagcctttcttatagctttattaaagtagaagcctagcttctttttattcttccctttcttctatatatctaggccctagactaatatattgagcggccctataatctttaagtataatttaataaacctatagtaaaagtttgcgaaacctataaattactatatatcgaagatatactctagttccggctaagtagtaatcgcttctacttagataaggtctatagagatactattgctaaagataataaatctaaggaactctacctaagaagtatagaaggtatacttcgaggcctttatatagagtttaaactagtagagccgttctaatactatttatatatattctatataagattccttatcctaggaaaagattaagatattatttaagtagattactaggaagatatctaataatcttataagagccttatttatataagcttagaaggttataggtatatttataagcctaaacggtattatataatactcgaaatatctatagtaggttctaaataccgttttttatttattacccttcttaatatagatcctatagtatatatctctaaggtctagcttagtatagacctttatactagtaagtcttaatagggatttactaattaagggtagggagtagtagttcttaatagtaattatatttaatctatagaagtctatatatagccgaagtttactatctttctttaatataaaaagaataggtacccctatagggctctttgaatattagatctagcccctcttaaggttcttgttaatataggtatatatagacatcggcaaagcccagcatgggcccaagatttcggcccacggcccaacccatatgggctatgggcctagctcccctaggcctagcccagcccatagcccagtaggctaagcccataagcccactagtagcccatttaggcctatttttatataaataataggtcttagtgtatataaaaatgcttacttagtagaatagtatactattacttacatgtgttttagtttcttaattgaaagacagccttttatgtcctagtagccttgaaattttagtttttatttatgaaataatttttaatatggccggtcacttattatttctagaaagaataaaaaaataaggccggtttagtgatactttatagataggctggtctctatatagaaatatatattatagtatagctagtaatgtaggtatactaggtatattatagtgaattataatacctatgcgaccgaatcctttgacctaaatactgattaaagactattaggagaattaagagatatctaatcctataatataatttaaaaatagtacctaaaagaagaggggggccttataaggctaagaaggtatcttaatcctattaagtatataccttttaaaattaaacttcttttatttttttctatttttaatagtatatattttagatttaaagtatattctttactctataaagctacctactaattttaaagggctaatatatatttctttatatatcctattctatagttagctatagtatatagtctaatctatatactaaatatagttattttaggataaaagggtatataggtactactatagagaatataaattatatttaaaattctttagactatagcctacttataattaattctagaaaatataaactaatatagagactagtatataggttaatatagagactagtatatagactaatatagagactaatatatagattctattattaatagaggaggtattctatatactatagtagagggagggggctaaggcctataggctaatagttaaggttcttaagagcctagttaagaggaaagagttaactaagtattagatttatatatttctagattatattattaagtaggagctatagaaaggataggaagactatactaatttttaataatagtagattagtataattaaggtttagtagtatatttaaaagaattaggagtatattaataaagtatactaaaaggcgactatactataaggtatataagatactaaggccttctttagatatattatattaaagttaatagttaagctaactagtaaattaattatagtaaaaataaactactaggatataaggcttactattaataataaggttacctaatatatttcttcctctaggagtagggtctagaagaattataagtatattaagctaattaatatatagtaggcctactttaggctatatagtaagtcgannnnnnnnnnnnnnnnnnnnnnnnnnnnnnnnnnnnnnnnnnnnnnnnnnnnnnnnnnnnnnnnnnnnnnnnnnnnnnnnnnnnnnnnnnnnnnnnnnnnnnnnnnnnnnnnnnnnnnnnnnnnnnnnnnnnnnnnnnnnnnnnnnnnnnnnnnnnnnnnnnnnnnnnnnnnnnnnnnnnnnnnnnnnnnnnnnnnnnnnnnnnnnnnnnnnnnnnnnnnnnnnnnnnnnnnnnnnnnnnnnnnnnnnnnnnnnnnnnnnnnnnnnnnnnnnnnnnnnnnnnnnnnnnnnnnnnnnnnnnnnnnnnnnnnnnnnnnnnnnnnnnnnnnnnnnnnnnnnnnnnnnnnnnnnnnnnnnnnnnnnnnnnnnnnnnnnnnnnnnnnnnnnnnnnnnnnnnnnnnnnnnnnnnnnnnnnnnnnnnnnnnnnnnnnnnnnnnnnnnnnnnnnnnnnnnnnnnnnnnnnnnnnnnnnnnnnnnnnnnnnnnnnnnnnnnnnnnnnnnnnnnnnnnnnnnnnnnnnnnnnnnnnnnnnnnnnnnnnnnnnnnnnnnnnnnnnnnnnnnnnnnnnnnnnnnnnnnnnnnnnnnnnnnnnnnnnnnnnnnnnnnnnnnnnnnnnnnnnnnnnnnnnnnnnnnnnnnnnnnnnnnnnnnnnnnnnnnnnnnnnnnnnnnnnnnnnnnnnnnnnnnnnnnnnnnnnnnnnnnnnnnnnnnnnnnnnnnnnnnnnnnnnnnnnnnnnnnnnnnnnnnnnnnnnnnnnnnnnnnnnnnnnnnnnnnnnnnnnnnnnnnnnnnnnnnnnnnnnnnnnnnnnnnnnnnnnnnnnnnnnnnnnnnnnnnnnnnnnnnnnnnnnnnnnnnnnnnnnnnnnnnnnnnnnnnnnnnnnnnnnnnnnnnnnnnnnnnnnnnnnnnnnnnnnnnnnnnnnnnnnnnnnnnnnnnnnnnnnnnnnnnnnnnnnnnnnnnnnnnnnnnnnnnnnnnnnnnnnnnnnnnnnnnnnnnnnnnnnnnnnnnnnnnnnnnnnnnnnnnnnnnnnnnnnnnnnnnnnnnnnnnnnnnnnnnnnnnnnnnnnnnnnnnnnnnnnnnnnnnnnnnnnnnnnnnnnnnnnnnnnnnnnnnnnnnnnnnnnnnnnnnnnnnnnnnnnnnnnnnnnnnnnnnnnnnnnnnnnnnnnnnnnnnnnnnnnnnnnnnnnnnnnnnnntatattatatatatagcctttctaagataattccttttaataatagagaaaataataggataaaaggaagtttttaattataagtaaattctttattaattatattatattctatactaatatttaaatctatatatattttattactatttttaaaggtaattaatatatataagtatataatagtcttaataaatagatattaagctaaggtattaggatttactttaattcttttattttctctaatatttaggatttactttcttttattatttaaactaatatttaaataataactttctaaggatatttatttacttagtaattcttatctttataaaggaaatatatccctattataatagctttaatattatttccttaatctattattaagatagtatttacttctaaagtatttaattttatattttagtattccttatatttataatccctatattaatcccttccttttctataattacctttatatctttctctaaaagtagttagattaataatagagaaactaaattaggattaatttaaagttattttaataaggttttctttttacttcttagactaagattactataattaattctttcttttagataataaaaaatagatatagaataggataaatattagttttaatattttacctctagtctttagtaagatactattattagatataattattatatctttaagaggtttctataattttataaaaagagtttatactttctactctttaatagtttttaataggtaatattctagtaatttaaagtaggttttaaagatatctaagtcttagtataagtatatctctactttattaaataaaactaagatatctataataatattataggaattttagagtaaagttttaatctaatccttaaatacttcttagttccttatatctctaaggttattttacttataaattacctattttcctttataatctatataaaggaaatttataatagctaaaaccttttattttcctaaaatatatttttttaaaattcctttaaaaaggatattaaggttatttaactagttttttctatttttaatattataattctttttaaatattataatatctcttttaattttattcttttaactatatttactttctaatattaaattacctttatttttaaattaatttaattccttttctttttaatatagtagggtttaataagtctattcctacctacatttttacctataaatattaaaatatatatctctatatatctatatatagtactactatactttacttaatttactttgaattaaataggattaaaccctatgccaatcttaggtaaaatttaaatttaatattttatataatacccctttgccttccgtactactatacatctacgccctatactcaaaatcaatgaatcaatcttcgattatagaatagcatcctatactatctttatataccttttaaatactatctaatcctccttagaccttcctatatatattaacttaggaaataacttaaaaagtttaacctttagctaccactatataggtttaattgggtttaaatctagtaagtatagcggccactcctctatatatatcccgtgagtttcaaaccattcctatataattttagtagtatagatctaagtgttatcttactaaaagatagagtagggtcgatagaatagaagtagaccttctttaagagtatctatataggaaatagtagtatatcctatcttctttaattctaggttaataatattctcctaccttataataattaactctaatcgactccctaactagattataccctaaactatttataaaatatctttaatatataccttagtatttataagatcttttctatagccctctaaccgaaagcgctaatactattatagtctacagtttattatttattatatagaatacttatccaagaagacctagttttaaatattatttctagactactcagagtgctatttttaaataaaacaatatcgttattgagctaattcctttctaattagaatcttcctttttatcctatattttagaagactagttagtcttaaaacgttaataatagtagagtaggatagataactaggtatagtataacttagcgttttataggaccaaaaggggtgccggcgggtgagtataaaaagtaaatggtaagttcgattactaaagatccttaggcgactagttcgagggagagatttaacagtattatattctttaaactgttttaaagtattataaatcgttcggcgggagtacctaaaatcgagtgctagctttaactgggtagtaccggcctagtgggtataaataatagctgagcgctgagcaatagatagcttacctgattttatacgacctaaaccaaggatatccttggttaatgtcattggggggtgtataggaagaagaaaaaaaaccacgatggttgttagggggatagtaagtggggcagtgggaacagactttttgaatactatgtatagagaatatctaagaatagctttttatataggatttttagtagtaagggatttaaagaggtataaatttagcc

SEQ ID NO: 112 - DNA, 235288 bp, Penicillium roqueforti
  misc_feature (2719)..(5484): n is a, c, g, or t
  misc_feature (6369)..(7199): n is a, c, g, or t
  misc_feature (41344)..(41902): n is a, c, g, or t
  misc_feature (188473)..(188627): n is a, c, g, or t
agggatgattgtaagattacgttccctatcaagaaacctcggatactattagtaaatctattgggtacaggtcatatcttaaccagaattaaaaagctgaaaagacaaggatggcttaaattgaaacgactgagtcaggctgtttatcgaaattcaaaccagatttcgcgtcttcgtgcgcacctatcattcttacaagcagagctcgaaaaacggatatcatctcgaaatggttcattgaatgccattttgtgtatacaggagctgactcaagataacctatccccaaggcgaatatatttgattgggtctttgttagttcagcattatctcgagaaatggagtaaggggccagttgatagaaataggatagatgttccggggtcgaccgctctgttaattgaccaaattccttccctatacacgtgacattatttttagctactttaggcagaagtgatatcgaagtattatctcatcggtcatacaataaacaatagcacaatgattaagttaaagctggtactagctttcaataattctacattgcgacacagcatatattacttcaagcagtctaggaaacttcttaggtagcgatagctttcgatatattaaagggcattaccaacgcacaagctataggaaaagcaagctcccccattttaaaagttctatcagattcaaattacatgtcgagggacactatatacagtagtagttataccagcttggtcattgaacctatccgagaatgattatgggccgaagatctgacttcgccagcctgatcactcataactgcatgccctcctattccagcggttaatgctgtcaattatctgcctaccctcacagcacctatgtgtcgtagactcccaatctctagtagtttatcggccacatttatctactactacccatagggtgaggcggaaaatcgcgctagccttgcttatctggtttgccagaacactgtcctcgtcaaataagtaccatatcttaaagttttatacaagtgcttccttgaattgcgatacaatatggttctcagttatcccattaattgcaaaatctccctcggttgagataactcctttagcttcttgcttctagggttaagaacatcctacagtattacagtgtcaaagccatccttataatggttagcagtattattttctattagtggttcaaccgtatgattagtccatcttttctactattacattgccaacccgtagatcgtcattcggctaggagtatgggaaattctatacaaggctgatagcagatagtagagctaaacattgctcgcctctatagtgcacatcctgtgtggatcggaacttctcgataactatgtctcctgtaagagtttgtattagtgggctcctacatcgcatataagcttgtggagagagctactgtggtacaccaagtatattatagttttcacgtagatatatagaattaaggaaattcctcctctagaaatatcactatagtagagtgaccagtcgtactcaggctacgataccaggctagcagttcgaccatcatcttctaccctacaatgaggcttgtaggtcggtgtacattctcctaataggctcgaagacaacgcgcgctaaacgtgatccattcactaggcagagctcttcgcattccacttaggcttcacatgctctttcaaccaggttacagattgtgttctgaaaatttcggagaagttgatagacaaaatcagtcgagcgctcggtgccggatttataaagcctttgtagttcggtgaacgtatgttctgtaagctcttagagtagcttgaaaagggaatagcaatcgcggtaatatgcattataagcttattattagccgatctgacgtacaatctatacaatatcctccatggtactatcacagaagagagaaagaatcacaatcgactctcaggttctgtatttacataatgagagataccaattacatagtcagagagtcggtcggtcggtcggtcaagttgaatatcggtaaggcgaaaaaggaacttttggcaacccaatataaatatactcatttctgaggttccggctattaagataggtggttattacagagacaatggttcctcgcttcaccgtcctatccctcaacaacgcgcaaagcgtcattgccatcctctatatacccccataaacatcccatctcatagtcaataaggacactctgagacccactcttgcctacaaagccaaatgctcgcccgagggattactgctcgagagagccggtacttactttgacttcgcaaaatagacactctcaattaccgaaacctacgcaactatgccatcggtatcattgtgggcattcttggattctcctactttgttatttatttactattattcttgattttccacttcccctcgtctcaacagtcaatcctatacactctggcagtgatagcgtttggtagaggaagcgccatatggtatctagatattgtctttcaaaatagcttcagtatattccagaagacaaaagtaacgaaagagcaagattccatatggtttagtggtttattcctggtctagacagcagctcttcccacaatcgcttttctctttccagcccaaccactgatacagcttggatacgcatcggctttcaccctaatcgctattagaagcctctcggacggttatctcaaagacannnnnnnnnnnnnnnnnnnnnnnnnnnnnnnnnnnnnnnnnnnnnnnnnnnnnnnnnnnnnnnnnnnnnnnnnnnnnnnnnnnnnnnnnnnnnnnnnnnnnnnnnnnnnnnnnnnnnnnnnnnnnnnnnnnnnnnnnnnnnnnnnnnnnnnnnnnnnnnnnnnnnnnnnnnnnnnnnnnnnnnnnnnnnnnnnnnnnnnnnnnnnnnnnnnnnnnnnnnnnnnnnnnnnnnnnnnnnnnnnnnnnnnnnnnnnnnnnnnnnnnnnnnnnnnnnnnnnnnnnnnnnnnnnnnnnnnnnnnnnnnnnnnnnnnnnnnnnnnnnnnnnnnnnnnnnnnnnnnnnnnnnnnnnnnnnnnnnnnnnnnnnnnnnnnnnnnnnnnnnnnnnnnnnnnnnnnnnnnnnnnnnnnnnnnnnnnnnnnnnnnnnnnnnnnnnnnnnnnnnnnnnnnnnnnnnnnnnnnnnnnnnnnnnnnnnnnnnnnnnnnnnnnnnnnnnnnnnnnnnnnnnnnnnnnnnnnnnnnnnnnnnnnnnnnnnnnnnnnnnnnnnnnnnnnnnnnnnnnnnnnnnnnnnnnnnnnnnnnnnnnnnnnnnnnnnnnnnnnnnnnnnnnnnnnnnnnnnnnnnnnnnnnnnnnnnnnnnnnnnnnnnnnnnnnnnnnnnnnnnnnnnnnnnnnnnnnnnnnnnnnnnnnnnnnnnnnnnnnnnnnnnnnnnnnnnnnnnnnnnnnnnnnnnnnnnnnnnnnnnnnnnnnnnnnnnnnnnnnnnnnnnnnnnnnnnnnnnnnnnnnnnnnnnnnnnnnnnnnnnnnnnnnnnnnnnnnnnnnnnnnnnnnnnnnnnnnnnnnnnnnnnnnnnnnnnnnnnnnnnnnnnnnnnnnnnnnnnnnnnnnnnnnnnnnnnnnnnnnnnnnnnnnnnnnnnnnnnnnnnnnnnnnnnnnnnnnnnnnnnnnnnnnnnnnnnnnnnnnnnnnnnnnnnnnnnnnnnnnnnnnnnnnnnnnnnnnnnnnnnnnnnnnnnnnnnnnnnnnnnnnnnnnnnnnnnnnnnnnnnnnnnnnnnnnnnnnnnnnnnnnnnnnnnnnnnnnnnnnnnnnnnnnnnnnnnnnnnnnnnnnnnnnnnnnnnnnnnnnnnnnnnnnnnnnnnnnnnnnnnnnnnnnnnnnnnnnnnnnnnnnnnnnnnnnnnnnnnnnnnnnnnnnnnnnnnnnnnnnnnnnnnnnnnnnnnnnnnnnnnnnnnnnnnnnnnnnnnnnnnnnnnnnnnnnnnnnnnnnnnnnnnnnnnnnnnnnnnnnnnnnnnnnnnnnnnnnnnnnnnnnnnnnnnnnnnnnnnnnnnnnnnnnnnnnnnnnnnnnnnnnnnnnnnnnnnnnnnnnnnnnnnnnnnnnnnnnnnnnnnnnnnnnnnnnnnnnnnnnnnnnnnnnnnnnnnnnnnnnnnnnnnnnnnnnnnnnnnnnnnnnnnnnnnnnnnnnnnnnnnnnnnnnnnnnnnnnnnnnnnnnnnnnnnnnnnnnnnnnnnnnnnnnnnnnnnnnnnnnnnnnnnnnnnnnnnnnnnnnnnnnnnnnnnnnnnnnnnnnnnnnnnnnnnnnnnnnnnnnnnnnnnnnnnnnnnnnnnnnnnnnnnnnnnnnnnnnnnnnnnnnnnnnnnnnnnnnnnnnnnnnnnnnnnnnnnnnnnnnnnnnnnnnnnnnnnnnnnnnnnnnnnnnnnnnnnnnnnnnnnnnnnnnnnnnnnnnnnnnnnnnnnnnnnnnnnnnnnnnnnnnnnnnnnnnnnnnnnnnnnnnnnnnnnnnnnnnnnnnnnnnnnnnnnnnnnnnnnnnnnnnnnnnnnnnnnnnnnnnnnnnnnnnnnnnnnnnnnnnnnnnnnnnnnnnnnnnnnnnnnnnnnnnnnnnnnnnnnnnnnnnnnnnnnnnnnnnnnnnnnnnnnnnnnnnnnnnnnnnnnnnnnnnnnnnnnnnnnnnnnnnnnnnnnnnnnnnnnnnnnnnnnnnnnnnnnnnnnnnnnnnnnnnnnnnnnnnnnnnnnnnnnnnnnnnnnnnnnnnnnnnnnnnnnnnnnnnnnnnnnnnnnnnnnnnnnnnnnnnnnnnnnnnnnnnnnnnnnnnnnnnnnnnnnnnnnnnnnnnnnnnnnnnnnnnnnnnnnnnnnnnnnnnnnnnnnnnnnnnnnnnnnnnnnnnnnnnnnnnnnnnnnnnnnnnnnnnnnnnnnnnnnnnnnnnnnnnnnnnnnnnnnnnnnnnnnnnnnnnnnnnnnnnnnnnnnnnnnnnnnnnnnnnnnnnnnnnnnnnnnnnnnnnnnnnnnnnnnnnnnnnnnnnnnnnnnnnnnnnnnnnnnnnnnnnnnnnnnnnnnnnnnnnnnnnnnnnnnnnnnnnnnnnnnnnnnnnnnnnnnnnnnnnnnnnnnnnnnnnnnnnnnnnnnnnnnnnnnnnnnnnnnnnnnnnnnnnnnnnnnnnnnnnnnnnnnnnnnnnnnnnnnnnnnnnnnnnnnnnnnnnnnnnnnnnnnnnnnnnnnnnnnnnnnnnnnnnnnnnnnnnnnnnnnnnnnnnnnnnnnnnnnnnnnnnnnnnnnnnnnnnnnnnnnnnnnnnnnnnnnnnnnnnnnnnnnnnnnnnnnnnnnnnnnnnnnnnnnnnnnnnnnnnnnnnnnnnnnnnnnnnnnnnnnnnnnnnnnnnnnnnnnnnnnnnnnnnnnnnnnnnnnnnnnnnnnnnnnnnnnnnnnnnnnnnnnnnnnnnnnnnnnnnnnnnnnnnnnnnnnnnnnnnnnnnnnnnnnnnnnnnnnnnnnnnnnnnnnnnnnnnnnntgcgaacggacggaattaatatcgcactttgcacccgcgatatacaatcattagccaatggcatccatagggtagcgagtgaggtcttagattaataagagcacgcaacaggatctgaattcattagtaatcgtgcgtcaaaggcagcattgaatataatatctaatgatataccttacaatttagtaccagcttcatctagattcaaatcatcatcggtattatgatattatccatagactgtgaacgtaggctaccagcgatataagctgtaagagcttcgagctaggggcttgataaaaggatttcccagacagtaaataccgagacccttactatagtttaaaccgacaattataacatacattatggctttgatttctcatattttcacccataattactatgtttatttagttcattcgaaaaatttcactctgtcaaggcagatatggtagtcaacttcgtccaccacaattgtaacgtggcatttacttcctaaagtactaggtcgctaacctcctacccaccttttaatattcttctatctcggtctaaatcttagcttaaattcaaattccatactgacctcatacatatattcaatcgcgcatcaaaacatagaaggtagtctaacgatcattctttatataacacaggaggccacgtcgcgataccaagatactttcaagtacctactaagcctaccgcttaagtgttagtactggaggttcttatccctcagacatatctatattatagtggacgctagatagataccctttctactgagtcttggcagcaagaaaagcctttcacccatagcagggacccgagtagaaaaccaaggctgttacagtctggcgtccagtagagccatcagannnnnnnnnnnnnnnnnnnnnnnnnnnnnnnnnnnnnnnnnnnnnnnnnnnnnnnnnnnnnnnnnnnnnnnnnnnnnnnnnnnnnnnnnnnnnnnnnnnnnnnnnnnnnnnnnnnnnnnnnnnnnnnnnnnnnnnnnnnnnnnnnnnnnnnnnnnnnnnnnnnnnnnnnnnnnnnnnnnnnnnnnnnnnnnnnnnnnnnnnnnnnnnnnnnnnnnnnnnnnnnnnnnnnnnnnnnnnnnnnnnnnnnnnnnnnnnnnnnnnnnnnnnnnnnnnnnnnnnnnnnnnnnnnnnnnnnnnnnnnnnnnnnnnnnnnnnnnnnnnnnnnnnnnnnnnnnnnnnnnnnnnnnnnnnnnnnnnnnnnnnnnnnnnnnnnnnnnnnnnnnnnnnnnnnnnnnnnnnnnnnnnnnnnnnnnnnnnnnnnnnnnnnnnnnnnnnnnnnnnnnnnnnnnnnnnnnnnnnnnnnnnnnnnnnnnnnnnnnnnnnnnnnnnnnnnnnnnnnnnnnnnnnnnnnnnnnnnnnnnnnnnnnnnnnnnnnnnnnnnnnnnnnnnnnnnnnnnnnnnnnnnnnnnnnnnnnnnnnnnnnnnnnnnnnnnnnnnnnnnnnnnnnnnnnnnnnnnnnnnnnnnnnnnnnnnnnnnnnnnnnnnnnnnnnnnnnnnnnnnnnnnnnnnnnnnnnnnnnnnnnnnnnnnnnnnnnnnnnnnnnnnnnnnnnnnnnnnnnnnnnnnnnnnnnnnnnnnnnnnnnnnnnnnnnnnnnnnnnnnnnnnnnnnnnnnnnnnnnnnnnnnnnnnnnnnnnnnnnnnnnnnnnnnnnnnnnnnnnnnnnnnnnnnnnggtagttagggggcggggcccgccatactggccgatgaagtctcaactcttgggttatttcttttacaataagaaaagatataaagagctggggctgatacttatagagacacagcagaggtcaattcagtatcacaccgggccacagtgatcatcataggcgcgataagttggtcctttagtggtatcaagacgtcagtgttgttcgtggtttagcctacaaggcttagcacaaataatcagacccggcgcagcagtaggcgttatatctcataaaccttagcatagaataaaatagaagtctcataatttcacataacagagctcgcacttgaaagtccacaccctattgttaaccagatattttaatttacaaccttccactctaggcatactgcattattcggggccaggaatagtatatatgccatggctttacgtagagtactgccagtagtacagggttatcagggccgctctggtgagctcccaaaggttcactgtcaattatagtcaagaccagggattaagagacaacaagaagccgtggcccttgccctagtatattgtggtcgaacttccacggatctagttgccccgcgtctttcgggtcagcgcatttataaggatttgtgggcttatatacctacagtgtaagcagttatacttcaaacttaagatacaaccagacccacgatagtagatcagctcagtcggctactatagcagagacgtcttcgtatagtagataccttaactagtcaatccaaatctttgatcttcgatcggctggctgaataggtcagtgaatcacgtctcttataatataggaactgtctgatctactagtctcgatatatactacaaatgtcagtacagtacaaatcccggtatataccggtccaacgggagaacttatcgagtgcatcagatataagcctctcaacaggatcaagtagataaatcgtagagcaaattgcaggggtagaggacacatctacaggcttctcagtctctatcacttaccaacttggtagcaattaccaaaagacatagttcttaattgaggcctattaagacgccttatacatttggcagtaactatttgcagcgatatctttaatgtttttacgtacttagcgagagagacgagtaaaagaggtattagcaatgaaagggataccgagttgttttaaactaagtggctctgtccgtctagactacggaaagtgaggtcacagtaggatatatgggtgctcgacccattaacccgttaaagcttggccaaacatcgtcaacactcaatttttgaagttatcaccaacctgcgaggatatattcttttttttttcttttcttttttttttggtgactcttcagttctataatgccgtttgccaagtttttgaggcttccaacgaaagtagaagtaatatctagttgagatatctttcacatcaatagccgtctatatctggccctcaacattatcaggcttaatcagttttcccgaccgactcgttgatacccccaagcgcccgctaaaaataagagcaaattctactcagaagctaactctattgattgactgatacaaggatcgtaaaacacagtctataaccatatacgtctacgttatctataagaggcaccaagaatcgatggaaatggtattgccctactccttgactttctcctgcaaataaatggattccctaaacagctcgccaggccaggaaaaagaaggaggacagcagcccagtgaatcgctagtccttagtgacagggaaaaatcaatggaaaaatcactagaaactcctgactatatccctctatcggtaagtaaaaccatttagcttcatttacttttgctgaatattgcagccctcccttttacgacacgataaagaaatcaaacatactttagcgatcgagccctttcaacctattataaaggtactagcagacttcgaacgcgacgatctcaagttcgcctttcccgcggctcgactggtcggactctatagacgcctgtaggagtcgtgcgtgtccaagcatatcgatggccagaagctacagcagagtaatcagatattaaaggaggctggtacgcacctgagaagagagagggacggtcttcagctataccacaagaagcagctagctcaactgcgctttttcgaacaggctttagaatcaactcaggaacgactgattagtctactcaatgactagaactacccttccaaacccaatctggcagggctaccaggcatggcaaaagaagggtaaaggattatacattcttaatcgtcctatatcttattcttacacaagaaatatccaccaatatcgcaaataagagaatcatcgtgtaaaaaagtagctttttttcattctcctaaacaaaaaacattcatgtggaggcggccatttctggcgtcaaagggggccgaaagtggcctcctcggcatagctcttccgcacacgtactttcggccccagagccacgcgctcatcgcctacccctagagaactctgtatagagacaaacgaatttaacgctatagtacgcacgacattacgttatcattatcaatacctccctcgcactcgcattccctaaagttgaagttcaagaagaacattcttatcaactgtttttttaagagccgcaatagcaattgccggcaaaactgtcagaaatgcaatactctcatcattgttcagaaattcttaggcgtagcatgaaattgccttaattatggcatcccaaagctcagtctcaagaggtagaagagtggcccagatctctcacataacaaatggatatctctaggcatttttgtcaatccagttgacgagacgagttcttacaagctgttttaggggcgcaatgtcaaatttgtcggctgccataagaactcctaggttattccacaaaactgcgtgagaatctttatcttcgcccgagacagactgcaacagattatagcgcggtatactgcgaacttacagccttcgcatgatatcgttaggtcggagtacctacctgattccaggaggctttgcaagagtagttgaagatctggaaaccccatataaaatgagagtagtaaaataacatgagttagtcaacgcaccgggcatctgtcatccgatggtttttataattgcccaactatctgtaatcctcgaaggtatataacgtcaaacccacgacaccaagttccgcgtataacgaaagtagaaattccagtggcagcccatgtactccgaggaaccctcacttaagccccaggaaaagacatcgggtagctacctttatatatttattaatatggatacctattggctacaatgtgctcaaattcactgtgccaggtttcgcgctaggtaggctgggagtggtacaaccaaaaaattccaagggaatatataccagagcaaccattagtagacataggcaatgtttaggttaggatgataaggtacagacgcttaataaattgtctaaaaacatatgagtttagattcgtgtacaatactatatcgaggaaagaaaagaaagcctgtattatcctaccataatcgaaacactatggtttccatctactccatttcccgtgcccaagaaacgccctcaacgactatatgattttaacctccaataggtactccacattcagggcatctagcttgctccatcggcataccgcactctccaatagcaaactatagaaaaaattatttagttcgtcaaaggtaacttagggcaattcgaggaatgggaaatttactcaccagatgtccagtagtgataaggtacagacgcttaataaattgtctaaaaacatatgagtttagattcgtgtacaatactatatcgaggaaagaaaagaaagcctgtattatcctaccataatcgaaacactatggtttccatctactccatttcccgtgcccaagaaacgccctcaacgactatatgattttaacctccaataggtactccacattcagggcatctagcttgctccatcggcataccgcactctccaatagcaaactatagaaaaaattatttggttcgtcaaaggtaacttagggcaattcgaggaataggaaatttactcaccggatgtccagtagcgcaattgtaccagtgcccagaataagtcgccattcctcctcgtctactaaccatggccatcttgattaactgaagttcttctaaagtgattgtttcgtatcgcgtttcctcatagaggcggaccatctcctagaccttttgttaaagctcaggacagttcctcggttcgtcgcatagttttaacgcagcggcgaggagatcgtgggtggtttagaagtaatcttagagattttctagaccaatttttcctttgagatatagatcgcttattgtttcccctggataagagcggtgataccacgcgtccagctgggcgatcttagcgaataagatggtcgccgtgatgacgatgcgggagaaatttccttcgttggcttgagttatcaagtctcgacaatccttcagaacttaaatcaaggctaatgatagtttggcaaagcttagaagtggtagcgttacagattttccgcttgaatctatcactctaaaggcatcgctaaacatgacttccttggacctgatataaattaaccgtgcaccgagggtgatttggttatcggatttatattgctatattcatcgcctccattcgggctgagagggaggctacatcgtcccttggtgacttctggtagatcgcaatcgcatccataagtcgtttcatcggctggttctcggcctccatggctttgctgagagctgagagctagagcctccgtgcatatcgtgcttcatgttgtaatttagtctccctcaccgccaccaacgctcgctcagagttgagcttgtcttcaatgtcattcagacgcgattcatggccttcaaggtctgtgcgacccttgataaggaaccgcttacaagtctcatccataacagcacggttgataacacgattttaacgtttcgtcacaaactgacgaatgggctgcttacagtccgatcacgatggtatgacactggcaagagaagaagagacatcgattgaacagacgtcttggagaccgtcaaatcttccatctttatctttcgtgtatacttcatccaggccaaccaatccatcaaccgactcactgataatgaaattgccgcatccaagcacgatgataggagtttcatcgagactgatttcggaataagttttccattcgaggaagtcaacacgagcgtctcccttgtcgccggcactcttgacacagattgtttggacagtcttccccgcagaggctcgggcattgatggccgcatctgaggatcttagtgcatcgctcattgcagggaagccgttcgcatattgccgcgcaacgcattgagcaggagcctcggtgtttgcaggaccaggtgcatctctcgatgcatggtgcacatgcctttctgcaaatcaagtcgcatgctgagtgtgagcatctaatctgtacatatgattaatgtctccgatacgatgaccagacgatgaattctaggattctgacttcgcaatttgcctcgcagtaaccacagctctcctcatcatgacatatcttcggacagctatgattgcaaacaccgtgggggcggtcacatcttttcgtgcacttcgggtactcaaatactcttcttccgtcatggacttcctcgagacaatttccgcagtaatcactgcagttgtggccacaactgagaatgtcgctgcagggcttagagcaacggaagatcggggacgtgacatctttgtaacagccaacctgaattgtatggccacacttaggaacactcttttcgaccttggcgtcgcacctaatgactttcaggttaggcatttgatggcaaaagatagctttcttgatattaccacaaggaagctccacgtcttaaatcttcgccatgcagggtcataatcttcactataaagcttggggcattcgtgctcacaggttgatcggatacatgggcaaggtttcccacatgcaaagccctcatgcatgaccgccgaatggcactcagcctggcattgatgaacacatggctcgggtcgacgggtacacgggagactgcacccaccttcagggctcttcttctcaaagtcatgaggttcataacagagaataggcttgtctgagtggcgaggacaacagagagccaactccgtgccgactgcattcgcacgggcgagctgagagtggacatcggcccacattgggacattgagctatgtttcagcatttccaatcagatacatgccgtgctaagctcgactgaggagcacgttaatgcggttttcggtgcctaggaagccaaccttgcgctttgagttgctgcggactagggagacaacgatcacccttgcctcctcgccttggaagttgtcgacggtagcaaggcggagcgtctggagcaacgtcttcttctcgaatgccttgcgaccatttggctcaggatattcatcttcaaatctcccaagcccatctgtggccaaggtttccaagtcccgctcgccgagacaaacttcgaaatcattggttagcgatgccctgagcttccgcagctgcccggtatagggtgccaaaagggcaatatccatgctcttgtactctccctgcagaacaagatgccgaacaagaacagtagccatatcgacttcccactggttgctatgagacttcacgcgactgccgtcatctcttgaatcttcatcgcatcgatggtccagccaaatgaggttgttccacattccaacaatcttgggtagattcagcacgctttcatgatcctcaagttttggatagacgctcctgatatgttgcgagatatcgggtctcattcgtcgccgtacattaagctgtgcaatacgggcaggattaagacctggttcaccgagagcgcgtctctcaaactggcttctctctagctgccacgtctttcttgtggatgattcaagactaagtgaatgtgtttgaatctgtggtcgcagctgtcgatgatccccaatctgaatgaagtgttcaactcctgacatgagggctgagatgacgtgggcttccattatctcagctgcttcctcgcatataatgacctttgttcctactcggcgcagtgtctcgatatggcgtgcaagggctgtggttgtgattcgtactacatctacttgaatcaaggctcggcggttgatctcttcgtggactgcattggtgtctccgcgaagatttgcagcgcgatcaagagcctcgaaaagcgaagcggtttcgatttcctgccactgtctgaaccagctcattgcaagaatctggcgttccggtatcgagagactgtgaatattttcattcgcagcgcgtgtgaggccttccaagcgcacatcgtcaacttcactctcattctgggttttcatcgatttggctccaagccagttaggtaatttatcatcagtgacagtcgtgaatccttccgtgtctggtcgctccagttgttcatgtatgatgggccattttcggtgcaagaaatggtccatcgcggcccaagacaggcctttttgagactggtgtagaggtttcattgcatatccagcattattcatgcagtcctcaagtctcccgtaggacataccgagggtttgcgactctaccctcgtcttcccaatgcctttactgacaacgcgaaggttcttgccttcaagctcagtggcctgactgcggccaccaatgcgtatgattttctgataccaacatcaagaagatgctttaagaattaggcttagcttttccttttcgttgatctcaaggagaacttgaacaagcttaacgcccaaataggactttccggtgcccggtgggccttggatgagggcatactctcgtgtgagagccgcgataagtccctggcactggccatggtcgagaccagtttgagtttgcagcttcaagagattaatagattcaggggtaatagggtccaatgcaaccttttcggcgccaacagttgtgatcgaagtcaggggaaagataagtttacgcgcctatgccggtgggggtacgctgtgaccatcttcgtcatccttacagcctggcaagatccatttttggaatgccaactctccttcgcattgcagcctatcggctttatatcctttgatcagacatgtttgcctgatgcataccgtcctagggcacggggtattctcgcgccattaacatgtattagttaatttgcaccgaaattacgtcactgctaacgtgacttagggtattaccctttcgggtaattccctatctgtgtttttagccatttcttgaacttacgcttaagatgtacattacctagtgaaatggtttgatatatgttgcaaagtctcataaatggtttggcgtatggctgtttctctctatctttgattttcttacatttttatagccatggggctacggatgcggaagagacaaacgaaagatagttacagtggtatttcacgcttatttgcaatccagcatctcaatttctgaccgtctgaatacctccactttgagtgtcatgttattcatgatggtttgtctttggttcctcgccagttaaaataaatgtttaactgattgatcccaggtctgaaattagacaaattagtatttccaagatacctcacttttggatcgggataggctcggggtaggctcagggtagctcagggtaggctcagggtaggctgggctgtggcaaaattgggtctcgactccgatggggggaaattgtgtaagttccccgcactgtattgtcacacttagttatccattacccgccactaccgctatatgttttttatggtaactttacaccataccggaagaatatgttgtaatacactgtaatcgtgccacgccgccaacacaactttcaacacgggagagtgttgatgggccgggggcgattacatagatcatggaccatcttaatagatcctcagatcaattgtcttatcactaattggtcttcctcgatactgcattttagtagtatgcagtatactggcggatatcattaatttggctgtaaagtgcagggtgtatatcaccggttcgaacacgcttgaagtccggtgcccgttttacttgtcatttcaatctaggccttagctgtggtattataccacagtttcatgattcggatagagggtagatgagggtagatacataccaaaggcccggagataaggcacagaaaggtgcactggtggcctcgtctttccatcagcaatatgccctagctctggtttaaggtgtcaagggaaacgcggctcagtaaatagaggggaggcgtggcctggcatgagatgaatataatgcttaagatgattacattcagtaaaggaacgaagagcacgacatgacaaaggtggcacatatgacgataccccgttccttccgccaacataacgtcttttacctgaaattggccaggtttatggaagagcaaatcaaacattgttgttacatggcaaagaccagctttaccaagatctaaacgagtttatagatcccaatcaagatgacaagtattgcacccataaccttgaactacggaataccccgatagcatcttcatcaagtgaggaaacggaaacttcttcctattcatgtcagaccaggggctgtttaagaagagcgaatgacagtcccatgcactctttccgcatggttcagtagcgcggactttgactccaacttctcaccgcaaaaagagcactcatagtgcatgtcattcggaaacagcttgatatgctttttgatggagtgtcggctcagagatccagagggcttgtacatccacaagcgatcgctttgtggcagaccagggctaccaaggcaaatgaagcaagtcgttggtctttctgttggagatttaacgcaggccgaagaaatagccttcgaaaaagtatcgtcgctcttatctgaaagggttggattctgccttttaggcaggagggcggctggtggcatatcgacatcattggtagagcatttttgggtgacacaacgccgcgagggtgcaccctcttctgcatccataccgcaatcactgcatttatcgcagcaattcgacgctcatattctttctcatgcatcgtacccagcatcgtcagcacagtgtcaataagtatcctgtaagaaatttcatcgtgaagatatcggtgtacccacgaatataccaattgttggatcatgtctatcgtgggaaatacaacggcttcagcgctatattgctgtttaaataaagcgtttctttgaattcacgcactttcttgacaacttaaataaaccagctagaaagttgcgggactaacaagctttttcccgaagtacttccattgaaacaatctgcatcaagcccatataagacagaagacattggaaaatttcccgaaatttcgtttatgtccacacaaagtaggcggccagaggtatctgtggaaactttgaatgtgtgattggatatttcgcaagcgtgctcatatatcatcatgccttgaacgcggcacacttctatatccagatatggatcatgggacctgggtctttttctagtgcaggctcggcatatagtcgcaattaaatgagatgatggttctggctttgttttttgtagtgaaggaagtccaattgttcacggccttcatactcaatcaacaaggctgccggacacctgcggcactaaataagcatgtgaccacgtgtcaagtccagttgtccctttgcagataataagcagagttcgaaatgcatcaaccaaatttttgactcacatcatttaccctcatgaatgttgcgtcgtcagatggggcacttctgaccgttgtttcagactgtggtgtatcaaggacaaatccacttgagttttcgtcctcgtaggggccttctaataaatctttggactctgaaatccctgacccaatagcctcacttgattgaatagggtattcaacttcagtttcgatagcctcaggtgatccaacattattttcaacatgctcgggcccgggcttgggttcgggtgcgaagctggcaggtggtcttgcatcgcgcgaaaggcactttgaacaaatgtttctttcctcccatgattttaataactaaagatgggtgggtatatcttcactgatttgaagtgtaagaatctgcggaggtaatactataaattgtcgatcatggtattgctctgattttattactatgactcgttattagacatcttggctacgagtggtcatcaacgtgtttcttcaaaatcaataattgcgcgatcggatgtttgcatattgtacacgcttgacctcgctttgtaagacacattcaagagagaaacaaaaaaacatcgaatatttaaggaaggggtaggccaagagctggtaaaggtagactggagacagttccatgtattcttcgcgcatggttcaggagtcccgtttttgatatcagcctttccccgcaaatgttgcaatcacagtgcatgtcatttgggtacggcttgatatgtttgttgacgaagtgtcggctgagggacccggggttcttgtacattgtcaggcggttgcgttctgacgatctagtattaccaagacaaataaagcagatcgttggtctctctcctggagatttgacgcaaacagaagcgatcgccttagagaaagtatcaccactctcatctgaggggatagacgtctgcctcttaggcaggggggcagcaggtggcatatcggcagtatcggcagtgcgtttttgcgggacacgaggccgcgagggagcaccctcttccgcatcacagaccgcaatcactgcattgattgcagcaattcgacgctcatattctttctcgactgttgtacccggcagagtcagaacactgtcgataagtgtcatatgatgcggtgtcatatagccggtacgttgcaacgctcccataacttcttcgtcaacaatttttccggaaagttgccgctcactgtcgatcaccggctgttcatttttgtaccgctccagattttcacgaattaatcggtgcttttgccatcccttctcgtttcgtaattgcttcactgtgcgaccataccgctcgtctgcataatcaaatttctggcgtagctttttgacacctttctctttagccttccaccgcttgcggattgttcgggaatgagggccactctgcggtgggttatcgccgaactcctgctgtaatgcagcgtgcgcttcttcataggtgcgcttcgtagcatctcgaatttgctttctcgtctgttttctatcttccagggtacgcacacggggaatatcattgatacagctcgaatcctcaagccgatagggtctgcgaggatcaatcgatcgactcattgagcaggcaaaccgcatgagctgtttctgagcgggcatgccccgcacaattgcctgggcatctacgtggatacccacactatagtgccggacaaaagtatcaatgctggcgtgctgcagcatcacgttctgcaattcatttgatacatccgctggtagagaggaacgcattagccaaaaattcctatatgcacaatgtgtcactcacaactatcgttgaacgcttttgctgcgccatatcgaagacaatatggcttcgctacttccgcgaagcccgtaatctcaccacctcgtttcattctgtaacgcagccatgacccggtaagtcccttttcgagtgcgattcgaaggccatcagcctctcgtactgcttggcaaaacacattctgatcgagaatttcgtccttcagctttaattcctgctcaccaagtccatctaggacccgaagacggtacaatttctcgggacagtccatcacagggccgtcttttgatagacttttgaatgcgctaattctaaatagcatgcctagcaggaaaacatgaggactaaggaccaacgtgggatcaaagatgatctccggaatcgggaaggtgtttctgattgaaaatgataagcaaaagggcgatgagaagcagtggctggaggaaagacaagcataaggaatggcttagtgaggggatattcttacgactctttttcaccaagaaatgattttgtgaattccggtctcaagtagatgaaaagtcgaggatgtcctccatttggatcccgaaccagtgtcaacttgagatcctggaagcgaagtttcagtagcgccccgggacggctaccggtgatggcggccagctggcagaaaaggaggagttgtatccggtaccagccacaaggaaaagtcatctctgtcgtggataggatcactcgggcaaactcagccacatcctcgacatacatggtcgctttcggtcgacctttgagggaaagtttcttatctgaggcaactatcgcgagcacctatggaacgtcagtcgcggaccatttatgccgatatcgatactcaatcgagatctcacatcgcggatcttaacttggatatctttgctgagctcatgtccaacctcggccttgtagatcagatgccaccacttccagaataagtcgagcgagcttttggtcttcactccgggggtgcgacgtccatcctttccccgtcgctggtcacaccgccaagagaagagagccttgaggaagcgtaccgtctcgtctgtatcagagagccagaacaaacattccaccggaccgcgctttgtgccattacaaaatctagaacaatcagcgagcccagtaatagaagcgggatgttgcaatgatgtctcacctatcccaaaaatcttgcgtctcatccaatttctcctgagttttcgggctgtagcgtttctgtcggagctgggagacatcgagagactcggcctcctggagatagtattctggtggaagttgctcctcctcatcttccgaagccagctcatcttcgggctcatcttcagactcggattcggattcgctgctcgagtcgaagacgctaggtgcgatggaggaatcagggtcggaagcgttgttcgagaagatctcaggtaggcgtgagctagtgtcgctcttatcgtcagacaaagcaggccatggagaaggcatggcagcgggacacagtatgggattgaagaggggcagcgaatacacccgttggaaacccagacctggggctggaggggttgctggagagcgaggtaggactgtcggtcgggggccatggtggtcgatatttatggaaactcagggaagcagaacggtcaacagaggagccgaaaatggctcccctccgccagaaaattgactgagggtgaacgaggatggggccctacggcgacgaatggacatcggttaatcaatgggcccaggcaccaggcacgtccaacccgagcacaggtggcagtaaatggggttgtgcgtgggctttggtgcaagtgatgccaagaccgaccacggtgagcgagcggcttaaaacggcgtcaaaagcggccgtttttggcctcctgctcaccgtgtcatcgttaattggagtaataactgctattgctattattgatattttttttgtctgacttctaccttcttaggtttccttattaggtatcttagctattattttcttccttattagcttagaaagttcctatactagtagctttattagggtatctataatgttttttatttttaatgtgtcttaagtctaatgattccttctctaagtatatactgtaccttgatttttttctcttttctgtctttccgacggtatctgggcatactgttattgcttggtgctttgtccctttatctttatggagctatccatggtagtaattagatcatcattagtaacatcgtcggcaatatcttactcttgttgatcactccttttctccgtcatgtagacacctaggtatatcaacttttcaattgcgctaaaccggtaaaatcgaaaaagaaagagcaaagggggataatcagaacacgcgcaaaaaaaactttttcccccgagacaatactcgatgggtaaatcctgagacacgcgatcgctaatcatattcaacaaataatcgacgctttatccgtgcgagcagtatcgatccttgtcatcgaaatcccagtattgcgggacgcaatgggctcaagggtatcatcaccattcgcaagacgctcctctcgctcccattccaagcgctcagcctccttcatgatcttgagctcctgacagaacttgctgttcgctctgatgcggtcaccgtagcgaatgaaagcaaacggaattacagagacacccatactgaggaaggcaattagactgcaagcccaaggcacgccgagtcgattgaacatcggcttagcagcgagcggaagcaaggcacctagaatgcttcgtgtgcagcttgcggcggactgtgcgctagcggagagggtttcgtaggcgtcggtcaggtagttcagcatagccatgaaaattaacagatagcccattccgaaggggatgccggagaggaagggtacgacccagtgaatgtttggcgaggctgtccagcctatccagaagagggagatcacgtataggggtccgccgacgcaggcgagggggagtctgcggtattcctcgatgaaggcccagctggcgttgcgggccttcgctcgggctaggtagccatcgtaccagatgaagacgccacaggcaagcccggcgccgataccgactgttgtacagaaattagaatctacttcttttttgttggagaaatggcgtatggacgacaaacttactaggcagaaacatcaagccagatacaccagggctcattttgtagatacctgcagatttccgttagtgtttatgtccaacagggttctgcatacgctagcggggagaggtcgccgaccttggaagataattggatatgcctcaaagtagaggtagaagattgcgtatgccagagcaagatacaatgaactcagcgaaacgatatactcatgaataatcatgcggaatggtcgcgagatcgtgataagcagcatttctggcagattgcgactctggaggtccaatggcgatacgatgcttgaattgccggtatctttgcgtagcttgtgcgcacggcgcttcagaatgaccggggcataggtttcaggcatggcgataatcaatggcaaggtagcacccgagagaatgagtccgatccaaaaacaccaacgccagctgacaactgcaacgaagccagatacccaaggtccaatgattggcccaagggttgtacactgttaataaattagctgtcgagcccagaatctctagttggatgtatgcggcaagcttacagccatgaaataagccatcaggcgacctcgcagtgtgggatcgtcatgtacatcagcaaacaacccaccgacagtggcgataggcgccgacgcaaccatgccattgaatagtcggaatacaagcagagatgcatacgaatttgcgatagcgcacgctagcgtgaatatcatgaataagacaaaagagatgagcaaagggcccttccggccaaaatactcggagctaggaccccacagcaatggccctaaaatgtatccgacgagaaagacggagatgggcaagacgagagcggtttcgttggtgatgttgaactcttcggcaatttgggggatggcgttgctacaaatcgacgagccgatagtgctgttcatgacttgcatgacaccagctgagagaacaaggaacttcctcctctattaggcacatcagcaatcttttcttctccttgttttgtattggacaatatcccacataccgttctccagttgacggggttgtctgggtcattaagcccgaatgaaacaatcgttttggaagccactcggcggaatctagagtatgaagggttcccataacgttcttggatgggctcatgatcgacttctgagtcttggtcttcggagtcatgagagtcatgggagtcatgggagtgttgtgactcgtgagaggaagccactacgtgctctatacaacaatttcagcattttgaaattctaagatacaatgtagaaagcaccaacaaagagtataggcgactgacctcttgctgacatgaccttttgcacattttcctcgccagccacatggtccgacatcttgatggccttggcttatcaacaaagcgaaagtttggacgctaaatgaagatccaggcggattgcaagaattataaagagttcagaagttgaaaaagccacccccacagagtattagtggatgtttgactcagacaagtaaaaggtgtttaatgtgggttcaactccacattcatagagcaatctctgtggtacgccctaactttgacaaatcgagctgagacgcgagggtagtttagaaaatacagaaaagacaagccttccctgtcaaattaggtatttggtggtgttgatcagtagacctagatcgggtaggacggcttttctccaactgtttgggcaaaaaggcaggagccaagaagttgcggattgctaaagtggcaactagaattgtgactgtctgaaatatcaaattggacctcgcatagaagaccgattttcacacccttcacacgcgtcgcttgcgaaactacaaagggaatccaaacccacccatgtaaatcttgaagcaaatagctcgaccgcatgcgtctagtgatttggacattgaatcttctgtatgtaatgaagcgtgaagatcctgccgatcaattgattggtcttacattagcaattgcgtcagatagttttccctgtcaaggaagtgaggaccaatggggcaagctcgattttgggctgacgagcacttgttcccatgatatgcgtaatttgcatagacccgatcgagctacggctgatttttagtttgaagaagctccctgtagcggggacgccaatgctggggtcaacggggaacgggctattccgcacagcgtgggctcgacgtattttgttctcggagagaggttccgaaagcgctccacatagagtaaacgaacaatgccggttcaggggtatgccgtctttttcgatctgtgctgcgtatgccttgggcatcgaaggagtaatttcttgtgggttgggctgaggtcggcgaagttaaaagtgtcatttccggttgcgtgctgatgtgttcggcgacaaagccgatgtgccttgaccgcccaaaaatcatcagaagaagaatctggaagtgactcctgcagccaaaagcctctcgggtaatattctttcgaaagaaactgagtactgtgcatgagtggctgtcattattttgtcaaggggagtattggggttaatgcctgacgtaactgtcaccatattctgcctcaggcaccaaaccgttgtacacaggcgataaggcatcaccaggacccacaagtatccaagatttgtatagttattcacaggggagctaaatgtatgtaatatcatcgcttagatgcgtcttcgactttcaggaagcacaagtatctacagctgaccacaaggatattctgtcacataagctcttataggctgtatatgtcctcgttgctaaaatgaaaagactagttagtatttcaatgcctgatttctgaacataactgttcttgatgtatgaaatttacaaaggccgattgattcgattcctcccctccgcttgagaattaacccagacactgacactcatgctggccactgagaaaactccatagccgcagttattaatgagtaccgtctcattttgccagccaagaatatctgtccacaactccccggcatgtctgtgaccaacaaacatgcgcttggaggatgcgccaccgttgctaaggatacaggcaagactgaacgggtgtttatagttctcgtagcgcacgaatcctgtataatcgtaagaacaagcaatctacatccaaaaaagtgatactgaccaatgcagttccgtctattgaagtagtcccgttgtttcccgtgtgcatataactttcgcgcacgcgtgagtatgggaagcatttcgccgcatgtcccaggaggcttggatccacaattgattccatagaagtctccgtagaaaatgcatggctgcccttggcttcggaggaggattaaagagtatgcaagaggtttgaaaaatggtgcaatgatagtctgctggggtatttagttactatccacgccctaggatgtataatgctaaagctttggtctatctcacctctaatgaatgtccatcctgctagaggattgtaagctccatcatatcctcacaggacttcaacataccgtgtcatgatttccaacaaaagtctgacgtggtagtgatggttagtgggagtcctttctaccaaaataattgggtcttactactgcatgcgacggcatctgttctaccaacgtgcctttgaaaatattccgtagatcaccgcctgcgatcttcgagatagctgcaaactggcccaaaagtggcacatcgaacaacgagaccccataatccattaacttgagataccccagaagtagacccacctctcctctccagtactccgaaactaagaaataatcagcgccaacagtattgcgcaaatgtgtcaaattctttttggaaagacgcggaataatgctttactgcgtcgattcgcattccactggttggtaattcagtgccaatccactccccatttcattatatcagctcgaacttccgggtgggaatggtcgagatcggcgaacattaggtagtcgtagtttccatgctcatcactcacgtccttcgcccagtctttgttctgtcccagtatcttgtatattgcattctgctggctcgcatcgtcccagtccacaccagtaaagtgttgccagtgatacttcatggagctgtatttctccccacgtcccggaaagtcaaacccaacccaaccatcgatagtcagcggtcgagatatttcaatgttccgatctgcaagattgttgacctccatacgcgctctcatcttccatttgtcagcaggaatagaaatcaccttctgggtccatcttgacgactaagagattctcggttgaatctgccccagccttctggtttaaaacagcatcccagtaaatcccaatatccatatcctttgcagcccataccaatctctggaggtcctcctttggaccccatcgcgttgctctggtgcccttctggtcgaattccccaagatcatatagatcgtaaatatcatacccaattccagatgggtccatccctttacacccgggaggaatccagatattatcaactccgatgtctttcagatcggggattgccttgcggaggcgctgccaatggcgttgatcggctggcacgtgccattcaaacccctgcatcataagtgtgttttctgggggataccatagctgctttttatcaagtccgacaaaagagactggagaaccttcgatccctctccacttcttaggccttctccgaatcttcaaaaagcagcttaggaatgacagcatttgaccgagacttgcctctattgctgaaagtatggtattgatgtaatttggcctggttcttctccgcagcgtagggagaaggacaagaacatctagcaatcctcgactatatcatgttccccaaaagtcagggctgggcgaaactgacgagtgacactgacacaccctgctgtgcgatatacgttggctggtagaaattgaaacgcttactcgttgggttgaacgtcaaacgccgctctgtggaagatcacattaatgtttaaaccaacctcttcctcttcctggttcgtcggagtcttcttatggcacatttcaactatcctagtcttagaatatccacgccaatgtttaatgcgatgaatcagtgttatgcatagttgacgtgtagctacaatagatatatacaacatactgggtagggcaaggaagatatcggatcatgggaaccaggagtggcggtctgagagtaatgaagcgcctaaagcgcccaaccgtggaaggtgcaagattggagctcagaataaatgtcttggcggtgttgcgataacagtcacaaatggtcaatacgcgtgtccacagtggagatgtggctcgtgcgaggcaacaacgtgggggtcacctttgcggccaaccgacccttttcattattttatgcattcacagtcgtggagatcttgttctattgataaagctgtggatgctccatgtttcacgtctcacttctcaatttcctccatcatccgcttcgcgtcccatgctgccgttctctcttcttctccagtctcctccagctcgatcgtagccaactccccaaatctttccttccagaactgccacctctccttagaaaacccacattggcctttccagagcgggcctcctttacccagagcgccatcaaacccttcattccactggtagatgtctgccccgagaatactgatccacgcagcggcagcccgaatcaatgcttctactttccccggagagtattcgtgtgctggtgtttccagtgcctcgcgcagggtaatcaatgcaaaccaggagtatgcaaagacaggttctttggttgccatcaagcgtgccgtgaatttatcccggttgataatttgcgaaattgctttttgacgggcgtcaggaggtccatcaggtacgcctgcattccactcgtcccggaattgccagcctagcatgggtaggtctttccagacttgcatatcgtagagcacaatggagtccccatttgatttctttgcgtttgggagttttgatagttgaactagcacattgaccagtttatcgtggtgctcggggaaattgtatgcacacttgaagatcaagctccataggctggtaattcccccctcgaggtctgattcatctgccaaggagattgaagccagatgttcagcggcgtgctgtgcagatacactgtcgctgaataggtcttgtaggatagcaagccgagaggcaaaaatatcatctgtgatggcgaccattttgggagatggatcagaaatatgttttcgtatatgatgaaggggagtagtgatgttttaatattctgtttcaaattcgaggggctaattgtctcttatcatctgtgaatatggcctcgtggcctttatctgctgatctcattggttctgatttccaaggttgcatagcttttgacctatagtgctagttgataacctgagcacgctaatccaaggtcctacagtggggtttaaggccatcacaacatacggctttgaagtgccttgatttttttagaaataatttatgctgtcatacttgtatatacttcacagctcttactttgtatccaatcaatatttcacataccttcaatcatagttcagatagcatattaaaatgtgattatatcataacttacagaacaataattctccatgtacccatataactcatagctccaattgtatactccaatggccgcaatggccgcaaatatccaccctgacatgtcagctaatacgtgtccacagtgacgtagagggctgtggctggtaacaacattgaatcttccacctctgatagcgcaatgagttcgatatatgtacggagtagcatacagtgcaatatgcgctatacaaacagttcaattccatcaccacgagccttgaataaattcaatgtccagagccagcttggaaatgtgcctcctatcaaatccctttgcggttccttatcccgcctattcccggcaacgagctccaaccaccaaaatccacgtctaataatagccaatatcaacctcaagttggggtttgatgataatcaggatcaatataacaacatgcataacattcacccatccatgtagaaaagattagcaagacgctatacggttgaccgggcgatcggagttgagtgtgtggctgccgagcggctaccgcattggccgcgaaaagttttcgggttcggcggtcccatccctttgaaatcctttcttcttctcttcctctctctaaggcttcaattgaccattccatcctctcctctctttgacgttattctttacgttatctcacattaatcaaaatggctgtccctgtcgcccccaaggaggagatgagcgctctcaacctcgtatgttgcgaaccctgaaaataccaagctttaactgacccgattcttgcttccagtactcccgcttcgctttcgctggtgccgtctgctgcgctgtcacccacggtgctgccactcctctcgatgtgtaagtttttgaatctgtcgccggcgcgcgaagaagaatttccgctcatttccggtcctttacagcgtcaagacccgtatccagcttgaccccgtcacctacaaccgtggtatgctcggtggcttcaagcaggtcgtccagaacgagggtgctggcgctctcctgactggattcggtcccaccgccgccggttacttcctccagggtgccttcaagttcggtggatacgagttcttcaagcagcagtccatcaacgccgtcggctacgagactgccaagaacaaccgcaccgccgtctacctcgcctctgccggtgccgctgagttcattgctgatatcgctctgtgccctctcgaggctacccgtatccgtcttgtctcccagcctaccttcgccagcggtcttctccctgccatgacccgcatcctcaaggaggagggtatcggtgccttctactctggattcggacctatcctgttcaagcagtaagtttttttccctctgcccgcttcgggtatatatccgatgtaaatcccactaactcgatttcccacagggtcccctacaccatggccaagttcgtcgtcttcgagaaggtctccgaggccgtcctctcccgcgtcaacaaggagactctctccgacggtgccaagaccggtatcaacctcggctccggtctcgtcgctggtctcgccgccgccatcatctcccagcccgctgacaccatgctctccaagatcaacaagacccccggtgctcctggtgagggtaccgttacccgtctgatcaagatcgccaaggagctcggtatccgtggctcttacggtggtattggtgcccgtctcttcatggtcggctccatcaccgccggtcagttcgccatctacggtgacatcaagcgtatgctcggtgccactggcggtgttgagatcggtaaatagacgattcgagtctaatatgctcgggaggattgtagagactacccttagaattccttttgttttacgccttgtccatcccccacacacgatgtacaatattttgtctcagtttcctttcaagaacaagctcgcttttgttatatttacaataatttccatttcctcgtgaagtaaaagccttggtagtgataattgggttattgacgtctcgattgcgaaccgattggatttcaagaggccgattgagagatggcggaagtttgcgccgagactagcaatgagaattcagcgcgccatataagatttccctacggtcaatttcaaccgcctgttcactgcgctgagctattgacctccccggtgtgaccccgaaggaagggttcatttttgaatgagagctcggaaagtgcctgattagataacttcaacctctaggattgtccggatatagtatatatcccgaatctccttcttgataagatgtttcatacatatagatatcaagttgacggaggataagcagctccgactccagccgtgcggagggcagagcggggttgataagtatctccaacagtagatctataaattggtggacacccatttatcaaaagtgtaaactacctcattgcttccatctgaaacccacgcaactatgtcacaggaacaatacgagactttcaagcttggggattgggagctgcagagcggagagaagatcgaggatgctcatatcgcatacaagacattcggcgatccgaagtctccagctattgtctatccaacttggttttccggaggtatattcagatacgatcctttctctgccccaacactgctgatactgtctccagctctctccgataacttctggttgatcggagacgacaagctcctaaacccgaacaatttcttcatcatagtgccagccctattcggaaacggccagtcttcctctccatccaaccagccgagccctgggccattcccaaaggtgtcattttacgacaatgtgcgggcgcagtatgagcttgttaccaaacacctgggcatcaagcatttgcgcgccgttcttggctggtctatgggaggtgcccaggcattccagtgggcaacgcagtatcccgacttcatggatcttgtggttcccttttgcacggctgcgaaaacctcgctgcacaatcaggtctttctggaaggtgtcaagagctccttgattgcggtgaagaagagtcgatctgccgggtcgggagagattggccttaatagagagacggcggaagcgcattcttggacagctgaagagaaggatgttggcctcagggcattgggccgtgtgtatgctggatggtatgagattctgtgttgatttttgatttttatcccttatctgacacgttgaaaacaggggatttagccaggctttctatcgaggcaagttgtatgaaaccgtgttgggtttcaagggacttgaagacttcatggtcaacttctgggagaaatgggcttgttctaaaggttctgtttgatcccatcgaaccggttatatcggagaactgacaagtgctctacagaccctgaaaatctgttggttttgttgcagacctggcaaattggtgatgtctcgcagcaagatccatacaatggagactttgaaaaggcgatggcatctatcaacgcaaaagcgctggttttgccgtcaaaaaccgatctctacttcccgtgagttcatctcatatattctcccccttggtaaaagtgaggttaggctgagaattacatcatattaggcctgaggattcggagtacgaggttgcttgtatgaagccaggcattgggacactagatgtcttcccttcgatctggggtcgtgagtataccaatacaattacaagtagagaaggaactgacttgttttacagattgggcaggaggtccaggcgatagtgcgcaggatgttgaatggcttgataacaagctctctcaatttttcgcagagaacgaaggtggtagcgtgaattctctagccgggaagctccagaacacactttaataacaaagacacataatatgacatgttagcgttctgtcaatatggtttagtcatgaatgtgatctcttgaaatcgtaatgttctctcgtcgtcgccagaaaacagtagatatattgaccacgtgacgctgagtaagcgcctgccctggccctgcgaagcgccgatgaaccttgcgcagcgaccaacatccttcttcatttcatttctcttcgtttttctttcttttcttccggtttcgttcagagaattgtatttgttcccattgattgttctttttcattttcctagcagcatctaattccttcctgggctgcttacctcgggaaggctcgtcgaccttctccgctcgcgttatctaatcctccctattttcacacggcttgtgagactaaccttacaatctcgaattcctccccacaatggctacgccacctgtccgacagtggggtgttacacccccgatctcgaccgtcctgccgaccaaggacgagcttgcggcgaacgacgatctcatcgccgagctcaaggctcagaacaacttcgagctcccgactgaaacggaacggaggtgtgttcgcatctcaacaataaccgcaccagagctctggggctgacattgcggaatagaaaacaagtgctccagttactacagcgcgtcacagtggaattcgttcaagtcgtcagtcgcaagaagggtttgtctcctgctgctgttgaggcttctggcggtaaaattttcacgtatggaagttacagactgggtgtatacggaccaggtcagtgttcagctatgtatggatccaaactctcatgcccgtattaacgatggttgcttgcaggctccgatatcgatacactggtcgttggacctaagcatgtcctgattgatgatttcttcgctgaatttccccctattctccaaagaatggcttccgagggagccatcgaaaagatgacccctgtgcccgatgcgtttgttccaattatcaagcttgaattgtgtggaattagtatcgatctgatttttgcccgcctcgtcattcccgctatcccaatgaacctggatttgaagaataatgattacctcagaggactggatgaaagagaggtgcgatcgctaaatggaactcgtgtcacagatgaaatactggagctcgtccctcaacagaagacattccgtcttgcgttgcgtgcaatcaaactctgggcccagcgtaagcaccacttcctctctctgtaccgctattcaaattgtctaattatctttacaggacgagcgatttactcaaacattgtcggattccctggtggtgttgcatgggcgatgctggtggctcgagtttgtcaactatacccgcaagcaactggatctgttattgtggggaagtttttcagaatcatgaacaagtggaattggccccagcccgtcttattgaaacagatcgaggatggacctcttcagatcaaagtctggaacccaaaggtcagcacaaagcaccagtttcgctggcaatgtgggctaataacaacatcagatttatcatggtgatcgattccaccttatgcccatcatcactcctgcttatccctccatgtgcgcaacgcacaatatcagtatgtccaccaaggctgttattctcagagaactacagcgaggtggcgacatggtagacaagatcttcatgaagcagctctcgtggcaggatctattcacgcgccacacattcttcacccacgattacaaatactatctcagcatcaccgcttctagcaagaccaaggaggccgagtcggtgtggtcaggtctcgtggagtccaagctgcgtcacctcgttggcgctttggatcgaaagccaatagttgcagtggcccacccattcccgaagggatttgagagagttcatctcatcaagaacgagcaagagatggaagcagtcaagaatgggtctacacaatatcaggctaaaggcacaaagacggcgatgactgatgagactaaggatgctgctcaccaagccgcagtccagaataccctcgaaaatgcagaggttccaggaccggccgaggtcaaagtcgagggcacagtcgataatgatggcatgactgtctacacgacaacttattacatcggcctggagctgaaacctcttgagccaggtaatctcacccctgtccttgtatgacatttctaacttttttttttcttcaaaggccaatcgcgatctctggatatatcaaccgactcacagatcttcaagtcaacctgcacctcgtggccaggataccaggaagaagtcatggagttggctgtcacccatgttcgcaggtaagttcctctgtctgtgactcgtggatttttctaatgtcctctagctttgatttgcccgacgatgtcttccagcccggtgagacccgggcctctcgaccaaagaagaaagttaccaaacgctcagaaacggccggccaaaaacgcagcattggcgagttggacgtaagtgtatcgaagcgagtgagatcggcctaacctggcaaaccatcaaccttggaactcgtattccgacgccctgcgaaacaaaaccccggatgtcgacaataagaataactaataccaacttcgatttccagggtgcaaccgaaggacctgcgaaacgccaatttacctccgcaactcccgcctaaacaactccctgtatccccttcgcccctccatcccgccggggctggtccccaacaattgatatcagaaccacgaattgcttatggtctctgacctaatattgcagtttgaagttctacccatcaaccgaaccatctaactcctcgcatattcgaatgttacccttctctacagtgaacgtcccgtgctctcggagcataaggttggttcgttcttctcttctcttcgtcttttgtcttttgtcttttgcaacagctagactagacacccttcttctttctcgccctttggtgcctcacctcttactgggcatatttctcatggcgcatatgtgtatgggccggatttattcattatctcgtctatttggttggtgtagtatttcgttgtcggtggaatatgcggctttcctctgcccaggtgggcgtatccattcgccatcgtgcagatagttcaaatagtgaaatgcaaggacgtgtctcacaatatgtgggctacacataatccccaaactgtctacatcccagtaattttgctctcggctatttcccttcccttctggctctaacttgctggtattcaatcccgctactcttatgcgttcatttggcgcttcgctaaagtaattgagtgatattaccgttgatacagctaccattgaccactgctttatcttcccattggccattaggccatcttctaccggtatctggtaaagccatgctatatatggacgctcacagagtgcaagatatacagaatcttaatggaacatcttcgaagtcattccaagggagataaatgcattatagctttacgacaagaaaggtgtcattcgggaataataagtacaatggggagaaagaaaggagaacccatctacaacgagtgcatggttctgtgtggtgaaggaggaacttcctggaaggtgcggccaggaaagtacgaacagggcaggtgtgggcatgttcctcaattctcgccgcagcaagataaaagcaagacaaagcatggcatcgatttttgtgtgcctagagcatagatttcattttttgcccttttcaggcttgtcggctgagggtcgagtgcctgattttcttgtcgtacgcgtcttggttgcaggtcagtgtcaccgagcaaaaccaacactcggtctttgcatgctgttgctttcccacgtccaactcgtaggacacctatagcggggtttgctttaggtattgctgtggacattatcgccgacgttaagtcgcataggtcgaatgtagacgcgcaatgtattgtaccgcaatgccagggacacgatccagagagacatttcgcgtcggctgggtattttgcggcgtttggaggtgacatttaagctctgtcggctgcactccgacccttacaggtgtccattcttcgatgtcgcttatccgaattgctggctcgttttattccatctcggtatctgacggcagtgcgtacaaagctctcattccgaacctctctcccgtacttgctcatgttcattggggcttccatacttgaacatatccggagtgttaggcattttcgcaacgcatctatcccaggcaggagaaagactacacatgatgttcatagtctccatggataaacgtcacatgcggaagaaataaaaatgtgccacttttcattatgatcgtgacgagtcttttctcttgtggtagaaccagacccagacattcaagttttggcaagtcaccacgcaagttcatgttgggagggaaagtaggtattcaccaaattgtttgaacgccacaaagagaagtatgcccgagggtcacacacgacggcgccatacgggggccgactcctcgagccctgcgaacacaagacgagggacacagaggctttgaaacaggtgtttccaatagtcctccgactcgcgttgattgctcttgttccatctccaccatgctagagacaatttccccttcttccatcagcagtaagtgagtgttctggacatcaacagcatgacgcatcccacgactcccatatgtgatatagcgcttgatttatctcttgattttcctggcagacgtctccagtcgtcttcgccagtcagtttgaggcgaatagtccactccaccagaagctctcgtgttagagtcggtaaatatagccaatcgtctctcgggattgaaatgggtaattgtatttctattaatcgtccgaattcccttcttgacctcaatgattgcgaagattcttaccgtatcttggaccgcaaagctccgtccgcaagggtactttatgcttgtgaacttgcatataaagtgaatacggttgagtatccaattcaactttgggcgagtgaattgacagtgtttggagagaaggctttccgagtcatcgaagatatgctgtgttgtacttccgggacaatcgatgtatcactccgttaaaccccgtggagagggtgtaaaagagacgaatattttgagatggggattaaataggaagagggaagaacagaaaagagagagaacaggaaaacaaacgtgacctcaaaaatgcttcggtacgtaccttcccaatttggtctatacagtatacagtatatctgagaagagaaggaggagggaagaacagctgtgatattctcttcaataaatagcctatgggatcctagccaacaaagcaagacatcatcctcaaaattatttgctcaaactttcatatcctaagccctcttatagccatgatcgggctcactaggtagaagtttgatgtcgaagctgtggtgagaggtacagacgctactattttctcgattttctttagtcactgatgattctagattatattctacaatctctgaataaacttgaaggcattgctgtcccgatatcggcggcagacggtttaaaaatttgggaagccactgcgcgaatttatgaggagatgctgatggtaatcaaagtgagtgaagttgaggacattggggaattcgtaagagctcagatatgtttgaagaggacatttcaaggcctctctagttggatgaggaaaaaaaaagagatgctcacatgccgatttgaacgacagacctcgtgatggactagaaaagtactagtcacgcgctctaccaactgagctatgcgagctggttatgtgagcagggcggcggagggagaataacttcacacagtgttcaacttatcatctacattattacttctcgaggtcatatgataattattttggaaaaaggtgacaccagttaggtgatttccacctatatagtatgggactcatagtgattgagaaggtgattcctgtttgaaaggctatataatgaactgcgcgtaatatgaagcgtgggtggtgttagcgaaaatgcggatagtactgtagagggtggaaagtctaaggcggttgtgaaatggctgaaattgacgaactgttcttgtaagcatgcttgcccaggccacgagtgcgagaaaagctggacacttaaaggcaaagtttagagagatgttagcttaaaacgagtcatgacgctgagctaagtattgagcttggaagacgaaggtacgtgcaagtatggaatgttcaccgccttggcattaaccccttgttatagattgatctatggatctggaagccttcgtaccgccttttgatacgagtatactatatctttatcaagaaaggatatattataaacatcggataaactaatatctaaccagctcgcatagctcagttggtagagcgcgtgactagtacttttctagtccatcacgaggtctgtcgttcaaatcggcatgtgagcattttttgccttctccagctataaattttttacaatctgtaacggtgtctttttttttgctctctcccttcatttagccaatcttgataaccgcgaagtaaaacaagcgccaattggactgtgcacgggttagtaaattcatggctgctaccttttgagtaccgcgaggtctggaaaatgggaccttaacgtgcattgatgaatgtgtgtatatatgaggttattttagggttatgtctacgaaattttcatgcatgaggatgatttcgctcctccggactaaataaatccaattggccatctgatattgttcgaattgatctgatgcctaagagaatggactctgaaatcggcacgaaaaatgccgatgtagaatttttgagtgggtcctgccctaaaaaaatccgccgccccatatatcacagccagaccaaataaccatctaggccggctggcccaatggcaaggcgcttgactacgaatcattagatattagtttatccgatgtttataatatatcctttcttgataaagatatagtatactcgtatcaaaaggcggtacgaaggcttccagatccatagatcaatctataacaaggggttaatgccaaggcggtgaacattccatacttgcacgtaccttcgtcttccaagctcaatacttagctcagcgtcatgactcgttttaagctaacatctctctaaactttgcctttaagtgtccagcttttctcgcactcgtggcctgggcaagcatgcttacaagaacagttcgtcaatttcagccatttcacaaccgccttagactttccaccctctacagtactatccgcattttcgctaacaccacccacgcttcatattacgcgcagttcattatatagcctttcaaacaggaatcaccttctcaatcactatgagtcccatactatataggtggaaatcacctaactggtgtcacctttttccaaaataattatcatatgacctcgagaagtaataatgtagatgataagttgaacactgtgtgaagttattctccctccgccgccctgctcacataaccagctcgcatagctcagttggtagagcgcgtgactagtacttttctagtccatcacgaggtctgtcgttcaaatcggcatgtgagcattttttgccttctccagctataaattttttacaatctgtaacggtgtctttttttttgctctctcccttcatttagccaatcttgataaccgcgaagtaaaacaagcgccaattggactgtgcacgggttagtaaattcatggctgctaccttttgattannnnnnnnnnnnnnnnnnnnnnnnnnnnnnnnnnnnnnnnnnnnnnnnnnnnnnnnnnnnnnnnnnnnnnnnnnnnnnnnnnnnnnnnnnnnnnnnnnnnnnnnnnnnnnnnnnnnnnnnnnnnnnnnnnnnnnnnnnnnnnnnnnnnnnnnnnnnnnnnnnnnnnnnnnnnnnnnnnnnnnnnnnnnnnnnnnnnnnnnnnnnnnnnnnnnnnnnnnnnnnnnnnnnnnnnnnnnnnnnnnnnnnnnnnnnnnnnnnnnnnnnnnnnnnnnnnnnnnnnnnnnnnnnnnnnnnnnnnnnnnnnnnnnnnnnnnnnnnnnnnnnnnnnnnnnnnnnnnnnnnnnnnnnnnnnnnnnnnnnnnnnnnnnnnnnnnnnnnnnnnnnnnnnnnnnnnnnnnnnnnnnnnnnnnnnnnnnnnnnnnnnnnnnnnnnnnnnnnnnnnnnnnnnnnnnnnnnnnnnnnnnnnnnnnnnnnnnnnnnnnnnnnnnnnnnnnnnnnnnnnnnnnnnnnnnnnnnnnnnnnnnnnnnnnnnnnnnnnnnnnnnnnnnnnnnnnnnnnnggccggctggcccaatggcaaggcgcttgactacgaatcaagagattgcaggttcgatccctgcgtcggtcaatatttttgtcgttctgacgttctttttgctccattgttgtccagaatgtggccaaaaatggctgttgcactacatcgtacgatggtgtgtcgccgtatggttgagtggctcttagttttcagagtccacgggttgattgttgagttaccaagggagagtaagagtagaatttgaatattagaatttgatatatatttcagtatgtttacttcagatatgtgatatactaaattaaacgtaaatttgatactgcactacccggagcatgcaggttgatagtatgcttccctatagtagaacgtctagaaaacagtaaatcaaccacatggttagaatatcagactaaacatatgtcctgtcggtatacaaatgtctcatattggagccgagtggacatggcatgctaattttagcgttcgtttttagatgttggctaacgcataaccttgatttcattgtcctccaagttgttttaatgtttgtgataagtaaggcacgaaccgccttttatataccaggtgttaagcgggaccaaaccggcggtctttgtccaaagaaggtatgacttttattttaaaagtaaataataatggtcgcccgtcattgacatatttattggtaatagcagagctggtaagacatgatttcccactgatcagatttcacttgattgtttctcagtttgatctcactttcaagcaagcgatgtctcagtgattgatagaggcaggcttgctcatttataaatctataggagataatcgttagccaaggccactagcaatgagtgagagttccggatatcaacagcatgacgtataccattagagttcaaaaaccacctttgtatatactctcggagagcaattcttgattgagacatcccaacttcgactataagtgatggccacttactaacaagcgtagagtgagaatggacttcggaatcatactgatatccggttgctttgcgcagttgaacccggccacctctctagcactagtcgcccaccagcgccctgattgattcggtaaaccagcggcagacattgcatccccgaatgagtagtagagctggcaaacaacgcattcgtgctgcccgctaggcatgattattagtagtatgtttcgatcgtcaaagtaaatcgcactccactaatcctttcgcgaagaaggtgtttgcgtggggaaccgcccacgtcagctacggcttcagaggtaaaaggtattgagtttgatttgtttcttttggtccctctaagcattgattgtttgaggcttcttttgtcgaacgttcagtatcatcaggaatatgaaagtccgcttctgtaggttgaagctcgatgggggaatcgtgttcaattgtgatattagatgagttaaggcaaggcaagatgtagattcgaggagcagaggtgtttgcgttgctatctccgcctcaggggtacttttatggctatccatcacatggccgcttagttccatggatgtagtcttttatcttaaaggtatagagatagctcatatcgaaggttccctactaaagatattcggggatagtttgaaagccttagaaaagaccgatagaaagatgataatgaaatggttttataatagtgctagactttctctacagatgtacgaccgatctagatattatagtacaggacaaataaccgagggaaaaagttgaggctaggcctccacttatccaagcatatcagctttcaggacatctctcggcgtaaatattgtccagaaatgagacttttgccttttctcgttgtgctgaaacaatatccggactttttccgaattcatagggcactctgacctgacaacgaaatggcaggactaaatatttagctctattatgcatactggctatatgtagagattgatatagataaaaagtggatctggacaggacccctcgcgctccaccatctaactttgcaaaagaacaaacagaagattgtgcatctaataatctaggcaagtaaatctaaatgtaataagaaaatatataaaggaatgcaggtcaaaaacggctggtgcccacgcccttgaatcgacaagcccccacctttcagcaaaggataatcggtatctagaaatctcgggagcgcgttccgacctcgaggaactgctctataaaaccactgccggtccgcgtggaccagggagataaacttcctttaaacaaccatctaagtcccaaaagcttccccagctctaacacccacacccacaacatggaaattccacagcccctcgaggccccaggcccaatcagaccaataacctgcgtcgaaatgcacacagcaggcgagccaacgcgaatcatctgggatggaaccccgcctttgacaggtaccctgctagaacaacgagcgcaagcaaaagcccaattcgacgaattccgccgcgttctcatactcgagccgcgcggccactacgacatgtacggtgcgatcctacgcccggagaccgagctcgtcgcgtccggagaagcccatataggcgttctgttcatgcacaacgaagggttctcgactatgtgcggacatgcgacgatcgcgctgggccggttccttgtcgacgttgacgagaaggtatttcctcgtcggagggaattgaaatttgaccctgtgtcccggacgacgacgcttaatcttcatgtgccatgtggcgtggtcgaggttactgttcccacgttggattctgggaaatcggatgcgtcgcggcctgtttcgttcgtgtctgtgccgtcgtttgctactgctatttcctttcaggtccctgtgcctgagaagtatcgctgggctgagcttgctggcagggcttctgttacggcggactttgcttatgggggtgcgtactatggtatgattagtgctgaggaattgggcttccctggtggacttggggagattaagttgcaggatatggaccatgcgacaaagttgctcaaagaggctgtggttacgaatccagacttgcgatatctcatccaggatgttcggactgctgaggagggattcttgtacgggattatgatcactgatacgcgactgggacatgttagtgcttcagaggggacggcggctgctcgtgcgcagttagatgctagcagtgaggagacagggctctgtttctttgcgaaccagcagattgaccggtcacccactggaagctgtgtggctgcgagggtggctctcgcacatgccaaagggactttgccggcgggtgagaagaggatttataattccctggtgactcgtgcatacagaggtattcctggatttgttgggtctgtctttgatgatgctggcacaagtggaggagaccaacagagtgttcgagtctgtgtcgagggatatgcgtattataccggatatcattcctttgtggtagagaaggaggatggcctcggggtggatggattctctgtgagggacattgcactatagtggctatttgaagcagcgaattcaatatttgggtctgtgtttgtcttatttgaacttaaatagcggtgctttttgccgcctttgcccaccaaatagaataccatatataaagttagaaattcaagtttcattcttgatagtcaaatacttcatgcctaaactctctattgatctatttcatatagctaaggctctgggttgaaacataaccctaaaattgcggtctcgggatctccatggcttccgtggttcgaccatacgagataccacctagacgactgataggcttaagaaccttcaaatcgacaagattcctttcctcgttaatagcgtcatcccgaacccaaaaacgaacgccctcaatgatagcaagcacacccgatttcttaccgggggtgacccgactctcaaactccttcaactcaacaagcttgccctcgatagaaagaatggactccttgacacgagcaggctttacaacagaggtaggcgcctggtgcagccccgaaatctcccactcggagacaccataaggggcattgatagaagtcgagttggccgcttcaaggaaatgctcggagatgatattgataacacactccccagtctcattcaagttcctcaatgagtccttggctttctccatggacccagaaaagccaactgtgaacagcggcgggtcgtggttgatgacctgcgcgtagctgaatggggcgagattggtagtcttgccatctgcagactgcgtactgacgagtgcgatcggtcgcgggaccattcctgagatcaggaacttatagttggaggccacgggacggccctcttcattggggtcgatctcgacgtggtccttcttcagactcgcgccgtcgtcgttcgcgccatcgccttgcttccatgtggggtttggagacttggtgtatgtgatctcggcatcgcggcgaaaatctggccgcgaggcttgggttttctcgaaatcggggccgactttgagcattgtgcaggtgtggctgaagaattgagcggggtgattgggttgaaatggtgcgcggggtgttgcgagatcagcacttgagattataaatcagccatgcggttcagtatgggttgccccgcgaagtgttgacgatgagggtcacctccgtcatgctcgctagaaagtgagggcagtcaaatacttactacaattgcaagaatgagagcctccgagtatttcgggaggcagatttaagtagaaacatggggaatatggggcagctctttgattccaagaaattcttatcgcatttactatcaagcttcggctgcagcttagtgccacggatggggctgccgcggacttgtattgccacgcactatatcacttcctctaccgactatcgggccgactccggggatatcgccggggaacctttgcccctggagaaaaaccgagtcacgtcatgtgtacaaggtctgtttcaggattatgggtgaccgtaaagttgtgtattattacatgtatacaggacattcgaaaatttgcaagtattaatggcataaatcagcaaatgaatccatagtattggtattactgacctaaacccacaactgcgggattttgtttctttgatcctgaactgtccacaggaaatggccggctaaaagcaccgttcacctgaccttctagaaactgatgtggagcctgtcggtaaatactatattcttcggtctgttggggagatttccctgtttgagatctggaataagcttaaatctacttaaataaccttggaatgaacgatcaaccgtttcagataccgagtacctatacggagaatatatacacgtagtgttgctaaaagggtctatacttggaaacgtgggggagtgaaatacgggtccccagtccccaacccacttctccccataaaagctccatctgccccaaagcctggatcctcggagttgatgcgatgaatttcaatgttttgatcctattttagtcattcaagttcatgagcgtcaggcatattatattccgtcttcgctttattctttaaagatggtatttctaccccaaaaagtaaagtgattacagtataggtatataaaacacaagggatcgcctcgtcccatgaccgattgctcccgaacggggatggcgtggctatttccggcatagcggtcaaaggggggaaactgactccgatgttttcgaatcagaacattaccttacacaaatacatcgtgagatttccaaaagtttcggaaatgtaaactgtgctagaaagagtggcgtagtacaagcgaaggaaatcacgaggccttatcaactcccctcttccccaacttttctcccttgaacacttcacacatactttttgctcccctattagcctggaacattggccaccgttgatttcctcctaatgaagctttcgccatttgacaccttccctacttcatccgtccgatcctcgtcctccctgaaccttaggatccaagatccgcgccgagaatcccccgacgcgctcaagctgaagctgggagtgtgcaggtacccaatgggtcgaggccacggataattattggctcgccatgagcctcccttctcccaagaagaagaacggcggcattccttctgttcccagacaaatccgctttgttgccacagatgggcagccccaaaccaagcggcgccgcgttaatgccgcgtaagtgggcctcatatagttcacggacataacttcgaggaccaagacactgacgtcacttttgttttattcagttgcttaacatgtcgtcggcgcaagattcgatgttcaggtgaacaaccaggtaggatggacggggcgtctcgattgtggatatcttgctgacgggtatatgagggaagtatgtaagacttgctccgactacaagcatacctgcctcggatataccgagtcgaccgcacaccggcgaacgcagtccgactccgcatctcgagcgccgcccatttccgcaccgaatgaattgagccaacccgctgcccgggcagtcgaaagtagctcccccgaaccagtgtcaacaacgatagccaagccctctgcggataagccgaatgcgaaaccgcccggatcaaaggaagtttattcctgggatacttctgcgaacaaggacttggatacacaggctgttggggacagtccggcgagtggtcgtacctctgtgagctcggggggtcgtacacacgtcccgtattttcgatacttcggccctactgcgattgtaccggggtttaaacaaatggttgtgcaagtccgaggttctcgcaagagtaacccgtccacgtcctcagaatctctctctcctctcaggagccctaaactgtccgatattcacacaaaacccctggctactgccgcggataatcgggacagtcgcgatgcgaatatcccattttatgaccgagatgatgcacttccggtttcgaatattgtatcccatttgtgcgagctgttctttgcccacctcggttgcagctttcctttcctacagcgagagagatttctccaggacctcaaggagaagaaggtcgacaccatgttggtagatgcagtgtgctcgttagctgctagattctcaatacacccatcacttgatcctccacaggctcctcctatcgatcgttcgcagccgccactcgacgataaaaagtgggaccgtggcctgccatttggtcatcgcgcgatgagcggtctcgtggattcactgccatgtccaaccctttctgccgtccaagcctgcttattactcgcttatgaacaattcggatcaaatcacgacagtggactgtggatgtaccttggaatatccattcgcatggcacaggaccttggactgcagaagttgcaaggcctcaaacataattatggcaagaccggcgtcacaccgagtgaagtgatgacaggtcacgcggggaaactaagagaggaacagtatgatgatctggatgtgcatctgacacccaagactacctcacagactttggttgaggaacgtgcccgggagcgcgaacgggtagactcgttctggagcatctttttcctagacagagtcatctcttcgggtactgggaggccagtgacactgcgcgatgaggatattgaactctgtttccctcttcaatctgaatctcagctaccaaatgggtggcccgcgcctttcccaccacttattcggatcattcatctgtacggccgggtgaccgacctcattaatggcattcaggatgtcaacctcgtcacacctgatacgttgaagatgctggctgggatggaaagcgacctgaccggcatctatcaacacttgtcccccagacttcatttcaacgcagccaatttccaggcctatgtcaaagccaaggagggaactaatttcattcttctccatttttggttccatactctcatagttctccttcaccaaccgacgttgttgaactcatttggtggatcaatccaacatctctacccgaatagtcgtgagttgtcgatgtcatctgccaaaaccattgccgatatcttatccttctcggaacttgtcgatgggaaaagcttcattggcaatcctttcacgagtcagccgatgtacattgcggcgtgcgcattcctcatggaaagtgcttactatgcgtcctcatcctcgggagctgagtcgcaacaacctcagccactgttggcgaatcaatccagtgggttcgtgatgcccgctatagagtcatcgaacgggacagaacgaaagtctatggcgaagcatatcttgcttgcttctgccgccaaagagaactatcagcggtgttataaggccttgaaagcactcaatacatattgggaaggcactgggtatattttgacagtgctggatcagaaggccaaggggattgtcgaccctctcctttacgccgtggaggagatggaaattacccaaggtatcgcccctgggcaaccgcctgggccaggagcttggtgtgcgggcaatgcaccgacggattctgtctttgatccagaaagaccagccggggtcgcggatatctcatctgatgggaaatggtcaccacacattgacccaagtcaaggtttgtgagattcgttgatatttatgataaatatagcactaacaacttatatcttgacagctatcggatgggcactcacaggagcaacaaattcttcacagcccaacttgagtctactctatcagatgtccacgaccgaggccgagtcttcgcccaatagaccaacatactcgtcgcagtacagtcacagctacccagtcctaccgacgaatgccggcgaggggccaagctcttcatatgcgcaatctattgcacccgccaggactcacgaagaaatgacaccctcactcaagacaaatgctaaataccccaatgttcacgccagaacaactagcaccgacgcctcttattacatgggcatgaattcgacctatcccgaatcaaacatgcggacaacacgccccgtacagacaacacaatctacttttcccgggatgctcccccccgggctaccaacttcacatatggatacccaaccctccgcatataattactcgataccccaagcaacatccgatctccagccgggaatggacgatgccaacgggatgatgatcgggagtcatgaggtcgatatgaactccattaaccagcaagactctttgccgttcgttaacggcgagatccttccgtggttggaatacctccctcaagatgtcctcagtttcttcggcgaccatcaaaattatccgctcatgagtcctgacgatgtgtcacgacctccgtaatgttcttttcgtatatatttatctgcttgaggcgatttgcattcgcctttgttccagcgattagcttctgcttttgtttatatatttccgaccgagatgggggttttttggcgtcatgttggatgatatccttgccagcaatagatccctcttttggttgtgtatgttcaaaccggcatgtttgacttggaggagttgggttcaagtccatttccaatagactaaaaaaagtttctttgcaaattgatttctttgagatcctaacagacggtataaacccacgataaccttggaagttccacgttcaatacaacttacgatgtacgagtatattgtgtggcttgacgatcgacatgtcagtggttgcccggaacaacggggcggtgagcgactgtcaacatacgttggagtgtcttgaatttcgcgttcacacaaaggggaatatgtggaatttggttttaccaagtccctagattcttttgttatcacagacagcgctcgaaagtctcagaacgcatcctcccgccagccattacatgagaatctcatggcgcagttgaatgacgacagtcaacaaaacatcaattgcacagagatcctgagcccacaaccattcactcctccaagcaaaggcttccttatatcctccctcgagtccgagccctcccttgccgataatgcccagatgtcctcaacccaagaccatgaatacagctcctcctcgtcccgtcattcaacaagcgacgtcttcggccacgaaatggacgatgagctagaccaactgaaatccagagcctcgagtcgctcatcactagcttcgaccccagcctccgtcctcatccacccagtcgacagaacgaataaaatgccagagatggacatcaacgaaaagatagccggctacagaatggaggagtccgagttcggcgacttcaatgacagccccgctaacaaccgcaccatccgccagcgcgaagccgccttccgaaaaccgagttccgtccgggcgatgcaaatgcacacagaagatgaagccgatgacgatgattatataacgcccccgcgacgacgacaaggcctccggtcacggtcgcccggcccctccccattgagacgatcaccgtattactcgcccaatgcaccgaaacagccgaagcccaagagggaggctcccctcgtgctgctacactgcaccttgctcccgccgtccatcccagtacctggggcatcggacccgaggaaccaggatatcctcgaagaagagctaccggcgcaatactggaggcgctggcggcggctgcaagaccgggtgggatcgagcgtgctgcgcgatcgtggcgtgctgatctcgcacccggaggacctgtacgatatcctagaggagcggctgttggagagcctcgagctgaaacggccacgtcttcagaacgggcacttcgtgggacaggacgacaatgactctagctctggctccgatggggaattctcggatatcggagagagcgagacggacggcgagcagggggatgagtgtcccgactgtgggaagcatgtgcggcatggagatagtaatcgtaaatgggagattcaggtatttgccgcgaatggattgatgcgcgctggggcatgggctgctgcgtggcgcgatatggagaaggttgatgtcgaggtagggctttggttgccctctgatattcgcgataatttggagaggaggcttgcagagaagcagatggcagctgtggagcaggcgaatagtcagataccgcagatgtcgccgtcggttgatggtagacagcaggtcccaccggagtttttgcagtcgcctaggcatggccatgcccgcatggtcagtgatacggggtctttcacgacgtctgatgatatgactttcaggcaggctttcccggaagctggagctcgtctcgaccaaacgcctgaacttgggctggagaagaaggaacatgaacctgctctttcgaccctcctcatcaattacatccgtgttctggcggccgataagcgcaaccttgccctgcttgttctcagtgtccttgtggtttttcttgctatcggttcccgccagcaacaagtccacgtctactcccatttttcacaaggctcggctcatgagatcctgccctcctcggctgtgccgaatttgagcgcggctccatctcttattccttctgtttttataccgaattccgacttttcgacgtctgatatagtggagtctgcttctctgactgttgactctcttgatcctcatgcgcaggctccacttgaggaggatgaaaattcttcttctttgtctgatgtccccgttgagttttctgtgccgttcgagctcatggagcctacccggactacgcaacttccccttgggggcaacccagagactcctttggatgacactgtggactctactgctatgcctctagagtcctctccttcttccactgactctatcgagtctcccgttttgttagatgagactgcccagtctgataatcatggcgaagaagaagagctcgaaaaagacgaaaaaacagattgatccactttctcaaccttacgaccacgacaggaacgatatcaggcgatatgtttggcattttgatgatttttacaatgttcctctccattttgatgtcttttgctgatttagccatagccatagcccctcgttagttcagctttatgattctccttatattagcgaacctcatctggtttttcagatttataaattgtatgttcactcaatgatatcggccgtaaacgcttttttcaaatgatatgatccagttggatcgatagtagtagaagtctttctttggatatttttttctggatatcttttcctgggatgacataaaatgccttaaatctttttatgaaacaatgccaagtctagactttgatatctccactttgcccccaggtcctcccgctcgcttagtgatcgtccctctccaatagattagctatttgacagatattggatatcagatctgtggattatgcatagaacgtgtggagacaatgcacgaaaccttcaaactggttcttccatgtaacctgtgtccacatcttattctaaaggcgacctgtcctcacgatgcggggcaatctctacttgttacatcccacaatgtacaccagaaagcagaaagcagaaagcaaaatggaaaactgattcaaggctcgatattattgattatcgattaaaggtaaggttagttgaacgagttcgattttgtattgggcaggttcaagtgtcactggcccagcgaatttatccgtcaacccagcataagtcacaaccttcgtaaaaaagtgctaatcacgtccagaccttcgtaagcttcgtgacaggaacatctagtagccgccgccgtaaccaccttggccgccttgctggccaccgtagccgccctgaccaccaccgtaaccgccctgaccaccgccgtagccaccctggccaccaccgtagcctccgttgccgccaccacggtaaccgccgccgccgaagccgccgccgcgaccaccaccgccaccggcagcgcgctcagtagccttgtcaacacggatctggcgaccgtcgaacctgaaagaagtggttgttagtagatgttctgacgggaagtagatgtcgcgctggaacaggcgacgcccatgatgcgcgactgtcccaggacgacttgacttgaccagtcgcttaaagcggaggagaggagatatgggattagcttgcttactcctggttgttcatggcgttcatagcggcagtagcctcatcgtcggtggagtaacgaacgaaaccgaaaccacggctgcgaccagtatcacggtccttgacgacggtctagaaagaaaatggacattagagttgggcaatcagtgatggaagtcagagcgactcacagcatcctcaacaacgccgaattcctcgaagcgctggcgcagactgttgtcgtctgtgttccaggaaagaccgctagaaaatgagggtcagcaggcgcatgttatatcttcactagggtcagtcttacccaatgaaaagcttcgacattttgatggaaatggggtggagagagatcgagagagagggggaaagggtgttagtgtgaagaggggcacagccgagcctgatcttaaatacaacccgggacggaacaacatcaccccacagattcctgattcctggtttttcaggcgcgttttttattttgttttgttttgttttgattttgcgatttggcggtttgacgtgcgtttggcttggattatggcgtctgtgagacctgacttatgtatacttgtttgggtaatctgtttacctgtattgtcgctttgtcatacatagtggacccgtctccccacgctgtcaggagtctagattcctacactacttgcacctcatccaacagacgtatgcaacaatggcaccatttgaaataatatccagtgtggatgttgtagaacaagtgaccaagagcaaaagtaccgtatcgaaaactatatttagaatcctccttcctatgtgttctcgttatgaggtcataccatcccatctagatcaccccacccccggacgttctatataaaatcttctttctcctccacccaaccttgattctacaaccaacttacaactcatactctcaactcctcatctcaactcaatcatcaatatgcctgtcattgaaatcaccaggtaagtctctcccttacacaaacaaacacaaacacaaactaataccctacagcagagccgagttcctacaaaagatcctcggctcaccagaccccgtcgtcctcgactgctacgccgaatggtgctcacactgcaaagccatcgaaccgaaaattgaagaattgagcaacctctacaccccagtgaaattctaccaggtggatgtcgacaaaatcgaggatgttggccaggagctaggtgtgcgggctaagccgacattcatgctatttaaggacggagagaagattacagagattgttggggctcatttgcctgctgttgagcagggcattaaaactcatctcctttgagggcggttctttttttttatccaccgaggtgcttgtgcttgtgggatacatgcctccagtcatctgctaagctggtcttgttataatgttggcatgtcatcgatcagacagctgcttatccgatcatgttttaatggatacggctcttttatcaaagagggattctcaactatgttttattctagagtgcattcatacagatattgctcgaacattcggcatcccattatcccgtgtacaaccactcaatacactgtgcaacctacagcaaataccaaagtaaacatcacaccaaggcgtcagaaagcccacctatatacttccccaaatctatcccatatacctcatctagacactagaacccagcagcaatagaataattcgcagggataacaggccaagcatcaaccccatccaacatcgccaagaccatccccccactctgatgaacctgaatatgacaatgcaacaagaaagccccgggattaacaacatgatacctgatcgccgtccaactcaagcccgtgacagccggaagcgtatgaaaagtatcccgatactggggcgtctgcaaattaaagttaccaggaacagcctgtaccgcttccgcgaccgagccccaactaaaagtaccattcccctgaccgataatgaaatgcttattcgaatgcttgtggatcggatgcgggggctggaggatggtatccgtctgaagaatcaagtcgatccaggtattattcttcgttcggacgatcaagtcgccgggaatagagttctggttgaagagcaatggctgtgcttcctcgagctcgaggccgtagctggaattaccgagtctccagcggtaggcgacgccgacttggttgatgtgcaggaagaaggtttgtgcgatattgtttgacgggacgagcgctgggaacgggacgacgatggactcgttaaggaagacggtgtctgtcctggcggctgcgttgttgatttggatccacgggttggatggccgggttagctgcgacacgccttggtatcgcattattgccgtcgtgttcaggaactggtttatgctggcgctgaccatgcgcacggcgtagtctccggctggctgggtgagggggatcagaaccgagtatcggtttgagtttggaacggtgactgcgttgactttgagaggctcgatgtatcgtccgtctatggcgtatacccacatgtcgtgttcgtcgactgagaaggtgagctctagcaggccggctgtgctaatgagatcccagctcacgtattggttggctgcgttgacagtaaataattcttggggaccttgtgacggtacgcagccttcgaacatggttggggggatggcagcgtagttgtgtgggaagttgaacaccgtttcagtgatattaggagggaagcatctagtgatatagttagtctttgccgggatcatcaaagtactcattagacaaccactcacgccatatctgttagtttaagaccatcacccaaggacgttttctggacaggtgtcgtcagggcatcaatctcagcacgtggcagacaagtgatggaccctttgccattgatgagtaaagcattggcacagaatgcgtctgtgccagacgcaatctcagcagcccatatctcctccgacgtgaggacacgccattcagaaagcaaaacgggagaggtcacgatctccgcacggatcatagccctcagctgagcgggatcggttgtgataagactgaagggcttttgcaccgaggctgcaggggtgatatagatcggtccgtaaaggccgtcttcgagagagccgcggtgatgggcatgataccagtaggctccgtactcggttgcagtccatttatacaggaatgaggtgttcggtgtgatggatctctgagagacacccgggactccatcagaccaaggagttcccagctgttcaattcctatagaattcattagtatggatatgcaaatcagctcaagccatcgaagagcttaccatggaagtgtatagttgtattgaacgggcaccggttatcaacgaggaactcaacattgtccccctggttgatccgcagcgggggaccaggaaactgcccgtttgtcaaaatcacttgcctagacactcctgcgacagttctgttagaccatgtcaaggtaactggaaagaaaactgtagccgcatgtgtccattggacgaggcacagagcccaaagggacaggctgaacttcatatctaaagataacactagactgaaaatcactatcagatcgaacctgctcttgatgtcccatgctttttatgggattcccacccttttatgccggcccagggagagtcatggagcattgagtgagcatatgcatctcgcagctcttatgtgggtctatcacatcagatgcaggattctcatgggcgagtcttcttgcgagctcgtataggcgcaaataaatggaataagccatctacttctgtcgggaactaatctaacttctcggggaataggcgggggcgaagttcatccgagaattagtagattgatcttgggtcttgaagcctgtttcgcagctaagccaatgactaaaggctaaattaggtcgcaatcttcgatctgaagcaagggacgcgattgggaacagcaggctgactcctggcgaatgaaggactcaaagttcaagataccccggtagtcccaaacaatagcttggcggtgctgcagggatgaatctgtaatgaaggtgttggcactgcttgtgtgtaagcatagccctaagcgggcagattcaagacaggaatcctttgggatttggcacgttgctgatgtggtgtatccgggatgaatggcgcatgctgggcacaaagtttccacagccgtgggagagtctgacttggggtcagagttccggtaacctacatgttacacggatgagaatgaatatcactagtctgatcaaagaactgccggtctcggtcgtcatcgtactatgattcaaccagtcataaatcagctttcatcgaaaaagagtcggtgtaatcctcatcccgacttaggagccacgtgctgaaactgaatcaaggtacgcaattttcaggatgaaacgaaagccttaggtgagggaggttatagaaggaagatgggggcagttggattccaaactgaaccacccgccacaaaggtgacgtgtggaagctgcctggatgcagctgagatctaaaacaggagaaggaaatggaaaacgccaattgatttgtgatattcgaaaacatgattaatatccaagtcatatgctatcaacaaggaagattgtaacaattttgtgaagttaacttttcttgccatgtatgatacggcatgggggaagtaaatagccgccaaagacattaatagttgccatcgacaaagtagcctggcatgtcatcatgggtgtcattcgatgcaggagggtggcccgctttggaattgaaaatagcaaccgggtttgaagcagacaactcactcccacgagacggggagatgggctgaccaagtgagcctttcgttgaccatccttgttcttcggaaattttttgaccatcggcgccatctagatgcaagccttccaaaccatcaggattgatttcactgtagctgtcgttcagtcgttgtaggaattctgggtcaaatcccatttgtaccaaagggtcagctgtgctttctcccagcacagacgcagtggttggaagactactagcccaatccgtggagaaggatggatcaggaccagctgacatcatccctgcactaccagcgtaactgcctgatatactccccggtcggctgggcccagcagaagaaaagccagtgccaggaaagccgtggctgcgaagactagggctagagactgccgggctgtggatggcggccccttggcatactgttcgcgctagcatattgatctcccggggtggagctcggaggccgccattgatagcgaatggaggctgcatgcctagatcggcaaattggatgctgtcgttgttcacaggagtctccaatccacagtcacgctttaggacacccagccaaacaatattatctgcgcaggtctggttccagggatcgtcacatccatagatgacgcgacgagcttccgcttgtatcatctgatctgacggaacatgaccttgtgccttttggtcatttatgtatgcagtgagtgcgcgagaaagccgatggtaacaattgatatccgtaggaacgggaagcataagtgtgctaccatcccctttagcatgctcagtgccccagggatcaggagaccgccattcgtagtcaatcatgtacggcggaatggcgttttcgacgcgagcttggatctgtgggtcaaagccccagtccccttgccattgagccatgctagctccatgtttgaaatgaccggccaaatggtctactcgatctttccatgtgtggaagagggaaccacagaatccacagcgggagttgatatctgtaatgctgctttgccatttctccatgcagggttggaacttggcattgtgcatcaagcggaggtgttggttgagatgatccttgcggtaaaatgtcctctcttgcactgtcttctcttggcaggtgacgaaactgtgagtttcaaggtgttcatcgtctggattagctgccaagcaaaagacacaaacaggtataccgtcctgttcaattgcaccgccgtgaggggagcatgtccatttgtccaagataagatgtatggacttctcgtgccgctgccagtcatacttagcagggaaggagtcggtacaaaaggtacactggaaaggacgagcagctttggcctttgaatgggccagagtattgacaggcaccgaggccttgcggcggcggcgacggtctttccggtccattgacccaaaggaaagagaagatcgatgggagaatgcagaagcaaaagagagatcagaaatggatgaatcaaaactactggcggaggcagcgcacagtttatgttcagagctagcatggcttgactcattgttactagaacgggccctcacgtgactcgatggagcctggcgtggacgggagggatcgaatgggggattggccagggcacgggtaatatcgctgatcgtagccggttcgttttcggggggagagtacttccaacgttcaaggggagtcatgagggatacgttgacggattgcttcatggggatgtccacagctcctggaacaggagaactgctcccaggcgacgcacgaactttgccgcgtcgcctggcattggcgagccaattggcgatttgcgtccgagtcagatcagtgtgttgtttcaggtcatccctctcttgctcggtaggatacgggttctcgtcgtgatctctcagccagcccttcaggatgctgattgccttgcgcgagaaccgagcaccagttttctgagagcgtgcatctgggtcattggaatgtgtattgtatgagactgatttgagggctttccttccggtcaagctgcctgtaggaacataggcattctctgacacgctatgtaatgtctggaggaacttgcccggcgttttggcgtgagtgaaactgcattcacgccaaagagagatacagcatgtacaaccatagttcattataccgcgctttgcaacaaaacaatccaatcccattcgtcggcagaagtcgcacggctcctgagcccggtcgacagggtcaatggcttgtccgacattcacttcggactgctccggtaccgggtcattggagaactccaatggccgatcatgaaccatcgagttgaaatttgctgcctgttcttcgggttcgtcgagttcaatatcaatcgaagcaacatcgtcgtctaattgattagagccatgggcagacgaggcgccctcgaaatcgaaatactccatgttgcgaacgattctaaagggaaatgctgcacaggggacagcctttcaggaccagagtaagggaacaataaagaacacggttcaaagcagaagaggagtcggtcagaagagaaaatagtacccttccaaggttcgtccggggtagagagatgagtgagtaatcaattctggtggagctccgtgaccttggaaccagaggtgggcaccattcacttggaccgctcaaaggcaaatcccgtgtggcttttttttttcacgataagcatgatggtcatgaggaataaggccgaaacacatgcttgggtatccacctcatatcgcaggctccgatgacaatacggagtggaagaaattaatttgagaggaaggaagtccacactgagtgggcggagaaaggcttcgggtggagaatccgagtgaaaaaggaccaaaatggatgcatcggcgcgccctttggatgacaacgctaagcctatttaggttaagctccgtcgagttggggtcgttgcccagccccggtgattcatctcttcgcgatatcggacgtcggctttcttttttatatctgtgttgtgtaaaaggtatactgtttctatagtagcagcgataataaaatagttcacgtggattattatagccgttagatccatgcagctttcctcatgtaaacaacggatcgtcttccaaaggtctgaagctagcttacaatacatgcacacctattggtttgaatttccttcggcgtcggagaagtcgaaacctgttgcctcatgtagatggtttctgtatattctctcgatgcatttggatatgccgccgtaaaatcaacttgtctccattcaagaccataaataccaaagaagatacaatgtgtgatacacgatgattgtacaaaagagaggaaaaagacggagaatgttgttttatatggggaaaatgataattgatggctctaggcagtgaacttggaagaagctgagaagtgacattatcggttttctattgcgctcgtattctagtatagtgacacatcgagccctccatttcaaaatgagagattcgatagattcaggtgtttttttcaatgatgagaacaaaatctaatatttagtagatgattgtttgtcatgactggtataggaagcggcataccttgacgtagatgatttcgcaatatatcgtatgtttcatcgtcgaactcagcctgaagcgatctcaatcttggtaaacgggaaatgattctgaacgcagtttctggcgcaatattccgatatacaacagtcctgatctcgagttcacaaattatatcgattggcggtagcgtgtccgcgttctccgcaagctcaagaaaagaatgttcatatctccgatggagtaagtcatcactcatccagtaaaacttgcattccatatcgcttcatccttccttcatcatcgggattcgctagccagtcactcggagactgagcacataggagtagataaatccgactcctatcttctggccactccttcaaagctccccagagggctgtcaacgcggctgtaaacacctggttgttctgaacggatcggtttcattttcacaagcggcgcgggctagaatatcgtattctggaagtgcaatattgaactcaaggcgtgtgacgttgacctgccgctgtctggattaacttgagggtgcatagcctaaaagaccgagtatgcgacggaaatccgggagtcgagaaggagtgagacatagaatagagaaggtttcccgctcgatgacagccagccatgtcttgcagacggttgcgtacaaggccaaactatcttcttttgggaggaaagaaaagattcgggtaagattttcggggggaagataaggagtcatgttggaaccgtatcaatctccagagggaattacgcgtgaacggtttgccacgcctctcttggaagaaattattcgaaggccggattcctgtttgtctgttgtttcatcagatgtagatcatatgagaagatgatgaatagaatggggtaggtaaccagaagccataaagtgcaagaactttgatactggaaccgaggaatcaaaggcatgttagatgatggcggtcaacaaagatgacttagatatacgggctacctagctaggcagcctgtttgtcagtctaatgaaggacgcggctgtctgcttctctccctactgattcttcatgtatgcgttgagccaaggctagcgtgtaaaaacgaatggtgcaggctctgaggatttgactgaattagcgagagatgcccatataaaatagatcaggctatacttgtatataacatctacagaagatgtataaagatctacaacttcccttttgggttaaagcatttggtggggccttttctccaaagataacagttttgaggggaaattgaacctcgtcagaatctggcaatgttctaaatttcgatgatcggtaattcaacgggtgtttcaatgtccgaatctcatttgaaccagagcatttatacctgaattgcccccaatttgattgagaaaacctccttctcgttatcttagaatgaagcagggaatcgactttcaagagcgcgatttgcctcacatcgcaccatctgagtcagaccgtgaccaataccccgaaggtggattgaaggcatggtctgtggttcttggggcttggtgtgccatgattccgtccatggggctcttaaacagcctgggagccctacaaccttggacaagtacccaccaactccgggattattcggagtcgagtattggctggatctatggaacctacacatttttcctcttcttggggggtgcacaatttggtaatcgtcttcccaccatattgaatgcaatctgaactaacgagcacctcaggcgcaattcttgattcccatggacctctatatgtggtgctcccgggctctattgggatagtactttcgttgattttcttgagcttcagtcatggtgtgttcccaatatctattcgtgtttctcccctatcgtattaccttcactgcgaattcacacatccctacgcaagaaacaaagtctgactctaaataagagtattatcaaatatttctgtcattcagcgttctcggcggaatatcagctggcacacttttcacacctccgctggcggctgttggccattggttcaatgttcgacgtggctgggcaactggggtagcctgcacagcgggaggcattgggggttgcatatttcccttgataattctttttgcagctcctcgcatcggttttgcgtgggcaattcgcataatcgcgctggtatgtgtagtgacatgctcaattgcatgtctcacggtccgcaccagactcccttccaagaaagcagtcacatccatcgacttcagggctctcaaagatatcaaatacgcatccgtcacgctgagtgtctttcttgctgaatttgcggcttttattccaatcacatacatcacgtcctacacacttcatgccggattcgatgaacagatgtcatatgcggttcttgtctttctgaatcttggtgctgtgttcggacgattcctcccgggactggtcgctgatcggttgggtcgatttaacgtcatgatcgtgagttgcttaatgtgttctctgttcactctcatcctttggctttccgaggatctggtcgaccccgacagcttgggaattgtcattggctacgctgtgcttttcggcttctggagtgggtcagctatcagtattgcaccagtttgcgtttctcaggtctgtgaaatccaagattatgggaagagagttggaactacatggacgatagtcagctttggtaccctcgtcgctatccctattgcaggcgctattcagcagcacaacaatggggagttctatgggctgattatttttgggggtgttctctatatttcctgcacaattgcgtttatcgtgtctcgtggcatttgcaagggatggggttgggggataagattttagacacggggaaattatatattggcctacgacatacccggcctacaatcatgtcttatggaaaagtcattttgaattagacattcttcattggagcggataatagattatattcagagataaatcaaattgattgaagtctttaggccttgaaatcgacaagaggaaagccagtttgtaatcgtaagctcttgaccttgtgtagtaacgaaatcattcagagacacatggcaacgagcctacagtatgatcacagcaatatttatcaacagccataataaactcatccttcgtcatctgaccacgatcgagacaggccttgagttcctcgaccttttcgacccttgtcatactcatccaggtctcgaagcttgtcacacacaaagtctttcacctctggtctaatttgcagctcactaacacgtttcatccaccactcgaaaccgataaattgccgccacttcatgtaaggaaagccgagtggattgaaaaacccactaaaaagaagcatatgaacccatatggctcctgaagtctcggaccatttaacatgctcggagagttccttgtattgactttttggccttttctcttcttcctttaccaaagcttcattaaatatgcgaagacaatcgaaataatgttctgtagccaccggggcgtggtcactgttttcgattttccactcatcattgaccggtcgatcatgaagaagccaccaaggagctgatccgaagagctgcgctggtcctgcataaacccactcaaggtccacgactctgacagttgtgagatcgctatcgcttttcatgatcatgtttgctggggtaaaatcgtcgcagatgaatctaaatgggccattatcatccgccgtgttgacaaattgtggtattaacgattccaaaatactcaatggagtatatttggattaaacgtctagttcggcaatggctgaatttggttgatgtcgaagtgaaagacatgctagtccagactaaaatgtcagaccgcctatttgagcagtacccttagacaatgaacacgacgtgaccccatacaaacagcatatcccgcccacaaaccctcacagtacgactcaatagccggcttccactatctcgcctcacaaatttcgacgccaaaggagagagcgtggaaaaatttacacaaaataagattaaaggaaggagaagggggctaggtagtcactacgagtcacaaggggtgcagacactgctgaagggctcgaatcgggatattcatctagactacaagatgcttatgagggaggtccggtcgaatggacagggagacattatcattatacaacagatgttgcgtatatgctgtgaagaagtcggggagaaccacggctgagacttgaccttgctttcgtccagtggatagtgcctggcacctggcatactgagacgagatatcgagttacgcacttactgattggttttcacgtcggaccaaaccatagaatggcagccgttggtcgattagctttcctttgtaatattaatatggtaacaagtcatttctttccaaagacgtattccatcggtgtaagtgtaagtctagcgacactattgaatgccctcactttacatttaccataggcttacctttaattgtaagatgtgcaatgccaagaatgtggtcagttaataactagtagcggctttaaattcagccccaaaactcctgtttgggtaaaatatcacatgtctgccacgtcatcagtgcttgattgataatacaatattgtacaaagtactttattgtaaaaagtacttttaacgatctctatctgtaattatttaatatacaacttagcatcaccaattctggatagctccaaacaagattatgccgatcgacaaatccaaaccctacatacccctagccggcggcgcagatgacggttggtctcacgagcaccaagcgacagctacatgctactgtggcgccatacaacttgcctttgtatgtatagcgcatactcaataccaaggatcgcgaatttaacattaacggggaactatagccaaccgacggtcccggcctagttgacacattcctttgccactgtacagactgccgcaaaatcactgcatcgatgttcgcatccaacttcatagttgcagactcccatctggtacacctgcgcggccgggaaaatcttaaatcctacagccagtctcgaacaatcgcttccggcaaaacaatgaccaacttcttctgttcaacatgtggttcgcttatgtatcgtgtcggcgaggcatacccgggacatagcattcttcgtattggaacggtggatgattttaacttacatgagactaagttgaggccgagggttgagcagtatacaaaggatcgggttgggtggttacatggtgtggagggttttgagcaggctagagggacggcttatggttcggatgtaaaagttggcttggatttggggcatacagataagacggacgttgtgtaacactgtaagaatgaaatccaaactccatcaaataagagtcatccgatacggtgtaagtcgaggcgtagaatcgcgttgagttctcgtctgcgtatgattattagtcatatcggtttctaaaggtacctaaatgtataccgcctttccacaccgctctatagttacagctcccgtattgaagctattcccaccatacaaatctctaaaataccccgtgtataggcgttgaggcctctcagaccattctcaacaatttcatatacatatcctcatctttgatcccacattttccccctacatctcacctggaaacattggtctcttgaaatctgcaaattgtctggtcttgaagagatggcatctgctaattaccctagactacaagtcagaacttcacgttgtatatttttggtagcaattccacatattatttgcctttttgaagcgtaatgatcatgatatctgcaccactcgtttggtccggcgtgaggacccgactggcgtcatttttaatatcccagtatgatgctggtgatagagtttctgctggcgtcaaactcgaagtcccttgtattggaacaagcaatagtcgctttgtggggttttcgattcttgcaggcacaatgaagtggaaaacggtgcagtcatagacctaaataataatcctttagaaattatgttgagaatggtaacaaggggatgtcgtcagacgtacttgataaccttgactttccatatccactttcatctctctgccctcagacagaagtcgatactgctacccaaaatgacactctttcatgcgatctggagtgttgctctggatgatgttcctcatcctcaccacgatctcgttcgcactgtcccatagctgttcgcccgccatcggtgccactcagacagacagtaacggaaggtgcggcaactttgcacggctttacaaccttgtaaagccaaaagatttaatgactcctgttattattgagagatcacgaggtccaaaggcggggctgtcataacaaggtgcccgaaaatcacatgataatctgtctaatccccaaaacgaatttgatatgacaataatccacacacctttggtacacagatgtggaaaatgtactattcaaattattggcaacgcgatgagaaaggggcacagtggatagcgagacaaagaagggtctagcgctgttgtacccataacactgaagacgagaacctgaaaaaaaggtgccatcttgtcatcgacgacgattgattggcaagtgcatcgctcctcaacgatcctttgccgctccactcgagtgggtcgaacccgcccttccggatgtttattttgataccaagagatagggcatctacttttgctcacattgtagcccatactaacccgaagaagtgctcataaaagtgacagggtgggaatttccctattcaatgcaaaaatcatctgttcagcaagtagaatcggttgtgtcgagataagtgagaaattgcatagagtttgcatagagtttgaataacgttcttgttgcattgttcccgatagctttagaagttcaaggccgaaaggcacctcttcggttcaaacatggatgcataaatttgaagaaatcaaattcatggatatgcttttgttgacttgtaagcgggtgtttgaaggccactgactatatgaccatagagataattctagggtggttttaggtagaaattgatgacaaggtttgtgttggtcaagcaggaacaaaactgttgtagcattagaacggcaaagcattctgtgatccgtggcgcactcgagaaattctggcagatcctccggatatgggccgatgaaaaatgaaccaattctagcaggcgttggttccgtctcaatgtctagattgagacaaaaattgaaaagtacaaacctttattaggcgcgacgaagataaagtgaaagctagcctatctgaaagaaacaagaatgaacatgggtctataacagctacgcgaagcgatgtaatatataagattagtgtcggtctgtaaagacgtaagtagatctacaagagcctgcaggcttcactgcgcatgaaaacgctttagtaaaaattcggccagattggcatatcgtccctggctcacatcttgctgagccagaatctgctcggccacatcatgcccccaaacaaactcggaatgaaagttgcgcagttcggatagacgctgacggagccacctttgatgtgttatatcattggtttcaattaccgccatcaatagcggccagtgtaaacgcctgaggagctttggatcagataaaaattgtttttggcaaatgtcaatgatccctgctgtagcttgttggtgaatgcctagcggtaaagaatcgacacagagaagccggcggtggaaaaggacctggccgtagaaggtagaaacggccatgtatatggtgttaagcgtgcgtcgagcggaaacgctgccggcaaattttgcagtgataaaaaggtcagagaatttctggccacaatcagcatgtcactcgacatctagagggaggttatctatactgacttctcgtgtggcgaggatctcacggaaaaggggttctgtggagttggcggcaccagccgcggattcgacgaggaccttccaagtgcgatggcgtaggcaaaatccggcatgcaatagctctagagctctataattttcaatgtcgtctagaacttcctcctcgggatactgctcgccccagaagcatcggccccaaagacgagcacatcgataaaggtggtccggctgcaaagcgggattcccagactgggccacatagtcgttaagtgactcggtaagaccaatgggacgacagctagcatcgatatatctgttcatttgttagtcgtagtcgtttttttgttgaccgctggggatgaatcacagaatccataacaaaaactgctcgggaatgaaggagaccttggccatggtcacggtatcaccggtcaatgtgtcgactccgggagagaagaacatatcattaacatctttaattcgaaatagttgtggatgtgtttccagaagtgaacgcacgccctgcaggtggaattgaagctggattcccattagccgactaatagtgaacacagccaggacacaagattcttacatggcgtactgagtgtccgaactgccactcccatgctatcatcaagaatacagtggcaaaaaccgtctcgacatcttccaatgaaacctggcgcggcgtctcaagtaattgcctgaattctttaaccgcttggctgtaatggtactgaccatggtcctgagagcgcataagcagcccattgcgatgcatatcagatgcacttaacgccaatatcatccgcattattactctattcgatgcggccgggccttcgtagagatggctaattttgatcagttagccggttgaattttattgtaagccatttcgcacacgcatgaaagcctcaccataagccgctccaattccatctcttcatgtagtaaaatacgagtgaggaggaaggaaagtactggaaatgttgttgatcgagagaggtgagtgtcaatgaattggcgcacgcgacattgacgttcaaggaagggtatatggggggcgaaattggcgctacgttgaatgtgtcaagacaaacgtccgatgtccaagagatcggcgagagacttgtggaaagggcatctggttggaactcgacaaggtcctcggctttaggtattgaagaggcttgttcggaggttccgggtgcaggttcaaggtgacgaattcgcgtgcttcgtccatgtttcactggtatcccccattcgcaatttaggcgcaaggatgagcatcttgcacaaactggtttctcctcaccgcatttgaccttgcgacggcggcaggtactacaacctagcaagaagtgggttagtcgcgatgtagatgaggtaaaagtaatgtcctaccactcttggaacgtggtccattacgcccaaaaccctgcatggacatgaaccagcagggatcaacctacagacatgagcgaaaagaccgaagagagcgaattgaaagaagtaataatgaaagggtgtcgggacattggaagaattcagtgccgaggccgataagataacgcggggaaggctgagtcatcatggcgttgctccgactatttcccttttcggatgtctatcgggaattcacgttcttatgccgactcttacgacttcaattcggtcgcaaatgatgaaacattaatacaccaaaaacttcgatagtgaaaaaataaatgggctttacaaccattggagtgctatgtactaaaaatgcatatactcctcccgcataatctcgtttttccattggcgccgcgccacatcatacatatcattctccacaatcatatcccaaccgatcaatgccagtgattttccaacaatcaatgcctcggcatgagcttcatctgttccagctgcagctgcaaacgtcggatgatgtggaaacgaagttggcggagccggaatcgcaaacattgtgtgaagcgtgggggtctcgtagcttacatttcctattatggaagtacatgggtcagctatatcaactaaaggttctatagggtttagataccaatgtcagacgacgctgttaggaccttgtcatggcgcttgagaacattgcgaccatactgtcccatgtgaacctggtagcgttcacagagagtatcattcaatcggacatcggtataaagttcatcccttgaagcaagcatgttagtgaccagttcatcaaatacggctaaatgggttcatactcatcaatcttgacttgacaaccggtggccaaggcaccggcctcaatgcaattacgcaatttaccgatgagagtattcaatcctttcaaggtagggctgcgtacttgccagaaagctttcgtataagccggtatcacgttgactaccttgggtgtatccaagaaagcacaatgaacacgttgatccggaagaagctgctgtcgaagaaccgcaacgttgttataagacgagaccagagcatcaagcgcgttgatcccttcccaagggtttccaccggcatgggcattcctgcccgtgaattcgcctagatatttatcagcatgggatacaaaaatcagaattggagcgactcacagtaaatattcttgcgggcattcatcgacgttccagctatgccatcagatggctcttggtcaggataaatctttttgggtccagggtgactgcaagtaaagtcagcacataatgttctaaaaatactaagatgtatcttacgccattagcgagatgtcaacattcttgtaagcgccggcatcaatcaatttggcctttccgcctccactttcctcagccggagtgcctaacagctgggttctaccagggataccaaatttctttatggcaaacgacagcgcaaggaacgcagcaatactgcttgtcgctatcagattgtgaccacaggcatggccaattccaggcaatgcgtcatattctgcgttgaaattgatcaaccgtccatcagttccactcaaaacctcaaaggaggtatctagaccataggcgtggcgagtaacactaaagccttgtccttcgaggaagtcacaaatcgtatcgtgggcgcggtgctcctggtaagcaagctctgggtttgaccagatctgggaatgatcaccaacatgttagccttgcagataaaatggtgaccgtagggactaacgtacttgataattcaattcccgcaattcctgctctagttccttgagcgaggcatccacagaagtcttcacttcctcgatattgatggtcgtaagagtcatagtgatttaactatatttttcaattcgagccgtgtaaaattggaatccgccttagaaaaaggttcagtgtataattcctgttgggatatgagcaactttcaacccggattgaaacttgatcaaatagtatccgggtggcgtttgccaatataagaggggaaggcgatgccgaacgatatgtcgcattgtcctatcgccaatgtgacaatggaggtagtagtcacgaaattacgcctatcatttgccacaaacttcgtagcctaattttacctaacactatgcctctttaccattttcgccgttgttgtctttgactctttatcgggggctgtatggaaagtgggttgccgatgaacatgggcatccacattgccgacgaggcaatatgattcgttggactgccgatatggtaatgccaatattttgcgcctcacgaagtctatccaaactctagtatctggctacaattaagacctacatggatcttatctcggcatccaaagccacatatagtcatctctgtttgccgtccagtcttcccgtgttcattgcgaacgatgtggtttccgtgtggtttccccgcctattcttgcagtaaaaccagctcttatcaacgtaatattgactggacagctcatgaaaatcattggtctggttccctatcagctattccggtatcttgtgagtcgccatcggcttggcctcactgccctgaagtcatatagccctctaggacgcccgcaaattggttaataaaatctgatatcaacaatatttcttcctcttttctcacctgccatctacctatcttcttctctactcatttagtttagtcagtatgggacaacaagacctcccatccgaaagtataaaaccagaccttggaattctcaaggttgagtcgatttctgctgctcgagatgtcgatcttggacagctgtttgaggttgaaacaacaccagaaatggagaagaaggttttgagaaagctagacttctttttgattcctcttatgggcggttgctacatgctgcagtacattgacaaactagccattagtcaggcgacccttttcaatcttcgacaggacttggtatttcccctttcaattcagtcttttttgtcttcgatactaatatgcttccttttcactagggcttgaaaggcaatgaatataactgggcatcagccatcttttattttggatatttcgcatggagttggccgagttcatatctggtcgtgaggtacgtttgagagatgatgcataataacatatactaattatgaatcctaggcttcctttgggcaaatatctcagttgtgctgtttgtgtttggggaggttgtgtgatgtgtcacgccgcttgcacaaactgggctggtttaatggcagcgagattcttcttaggcattggaggtaggagttcctctaccaataaattccaatttggctaatgagtgcattttgacagaggcatcgattgctcctggctttgcactgataacgggaatgttttatacaagagcggagcagccagcaagacaagcagcatggtttattggtaattctattgctgttctccttggtggactgattgcctacggcattggcaatatccacggcacggctgttgcccaatggcaactgttgtttcttgtcttaggcgccatcacttctctctatggcgtcctcttattctttacactaccggactcacccgcgaaggctgtctttcttaagccaaacgaacaagcgatcgccgtccacagaactttgaagaacaagactggagttttggacacgggaaagttccaatggggtcaggttttaatggcggtaaaagacctacaaacatggtttttggtgctttatacactgtgtgtcaacttctgcaatggtggcctcacaagtttttctgctatcattatcaccggatttggattcccccatttagaggctcttctcatccagatgcctattggtggcgcccagcttgtcttcctcatccttacttcgggcattgcctccctcgttccaaagtctcgcattattatgatgatggtcaatacttcagtgtcgatggtgggtatgattttaattttgaagctagatagtgataatcaagcagggaagatgaccggtctctgcctcggtggtgtcttcgctgccaatatcccgctgtcgctcagtttgattagttcgaatgtcgctggatttaccaagaagagcactgtcagtgccctcatgttcgcggcatattgcgttggaaatatcgttggaccccagttcttcatcccctcggaagaaccttcatatctggtcagtacttcactctcatgatctgtccttacccagaagtgctgacttgataagaccggtattaaagcatctatggctggactggcctttggaatcttcttcttggcctgtctctatctgttttatgtctcggaaaaccgtcgacgggataggctgtacgggtctcctgtggagatgaccgagaccgaagaactgcaagacgagctatctaacaaaaccgatcacgagatcgaaagttttcgatatgtgctttgagatatttcacttcgacatgaatttgtccggggatatgaagcacatttctgctgtcttcatgcgtcctgtgattttgctcttttgtatcccactgtgtgccagacgagcaagtattttccaacagggcccttggcaaagtcattagagaaatactagcgcgaaaagatcagcaggatctacattgacagaattgttatggatgggagtacttcgatcgatataaaaggtctctcgccttcgccgcaaatagagattacgagtacataaaaatataggatttgtttcctttgaattctgatataagggcccagagctagctaaacaataaaaagcaacatgacacagagcaataaccttttctcggtgtgaaatttctagccaaatgaacatatgcaaactcattttcctggtaggatggttgctccggaaggtggttatttgacgatttcgtatgttttcgctgctttccatttttcgaatgcaaatgcttccaagcctgcatggcttactgccacaaaccgggattgtagtcccggaactctccttctagaacgctcggtagacgaatctggcccttccaagagatgccaggatgccggtactcgctcccagacattagagactgtcgctccagtccaaaagttcactttagattgccagtcctggccagccaaatctatcttaaccaaaggccggaagtcttgaaaatcagaatgacgccatctgagccagcatattccatggcatgcttgaacgagtagttggtatagaaaccaggcctaaactcgtggtcaaaggtttttggagagatatgaagtgtgaggaatgcggccaggctagccactgcccggcgggataaacccttaaaaagaagattaccatcttcagggtatcttggtgagttctgggtggggttgttggaggattgctgtcagcagcgaagtcatctgacaacgaaggtgtggtatggtcaggtaatccagctggttggtggttctcggccaggcgggatacgttacgtgccaagtcgaactggaaagaaagagtgcattcagacaagatactaaacgtggagaaagaaaggaaagaagaacaggacgcagagctacagtgtcgtccttatatccccaggggcaaagccctatcctcgcttacttggtgaggaaggaacgagtccagcaagtgccaatcgtagaagcaagttgcaaagtgggaagcagcccattgatatagctgccactttacaaacaatgcgaacctcgaacctcctcgcttagctattcaacaaacaacctatttatcaagcagtaacaatgcgaacagtaagcgagcaagcaaatatgaagcatgtgatagcgatccatgtggatcgtgacactggtactgcaaagttcagtcatagatccaaactccctctgtaacatgacattcccttgattatcttcagcacattgcagactaatgtattaggaatttccattttcatttttatcaatgaccctatagctttagaaattcaagtttttgctccccatttaggaggtcagttacacaatttggtaaccgtccagaccgaagctccataacgattacagagatgcctaaggggaagttcaaagctatatttctgatatctataatacaataggcatggcctctatctataagggttctaattaagagatccccattcaactggcctgagtgtaaaccgtatcgtcggtgacagcttctgctggcagccacttcccggcaacggtgtttttgtacgtgagttgggcgagtgtaaaagtgtgaagctcggacaccagaaccgtcttcttcaggggcaagatgcggtgtaccatggcgttttgagtaagcatcgagatgtactcttcgtcggctacggatttcatcgaggcgtcaaaggtcacgcggatcaaggcatcgggcgagtctgtgctaagcagcgacgtagataagagccacaaggctgggccggccgcagtcgatgcatcggcaatgtgcagtaggccagcgttggtgccgagcagcgggtgcttgagcgtgaaaaactccattgtgccagaggctccaatgtggccgaaagtgccggtgccaccagtggcattgccagcgagagtgaaccacacaccactcaaaggaccggtagcggaaatcatcccgacggcgttgttgccgacgctgggcgggatgggcatctgattcgtctcgccgctggtagtattgatgcgcaggatggacgagtcattgtcttgtgtaacatagatcaaaccagtggacggttcctccttgataaacaccgggctgttgagtgcaggatacagtatgtagtccttggcattgtggatatccgcagagaacacatagtagttgccattttgctcggatgccaccttaagaccggcccagacgcggttgccgatctcaaacacacaatgcgggccgttacccggcgccgggatattaatagtcttcttgatgatcggtgcagtcgagagtttcttgccgggatccacaagcagtagcttgttttcgccctgcagtgacaaccacatcatgccggggtatatcgttgatggccacacgccatggagcatggaggtagtgctgttctttcccatggggaacgagtggtaagcaattggctcctcggtggttgcatccaactcgatcttgataagattgctgtcagagatctgcgtcaacaagacgaaattcgagttcggcacatgtgcaaactcatgcgtctgagtggcgacaggcataagatactcggtgaggcggcggctcacaagcgaatgagaggaactctgtgccaacacggtgctggcgctgagcgccagcccgattacgagagacttgcaagcagagaaaaacatattcgaaatgccccgcttgacgttatcggggcttcaaatgttgatgtgttcgcacatgggaaaaagcactcatcttatattcactgcttccaaggttgtcagcttgtcagctcatcagcttggcagcttggcagctcagttttctcctccacatcttgcactagtgatttacatagtagttgaatagtctagcctactttataatttcttctctcctatcaatcaaccaattaaaaatcataatttcaccacaatgaggcaattcggaatctgcggtaaaattgggtagaaagccagcttaagtcgcccgcgagtactccgtaccttggaatgttgacttcagatcccaacctcgaagcggccgaccgaagaagttaaatgaccgtactattcattatgaacgccgagtatcttgctcgagtattccgtgggccttcattatgtgtggaataaagtcttggtgggcctggaattggctttattggtagtattttcattccgtccaagcttgcgggtacctgaaatctcttgcagcgccctacaaggtactcagtatagctcagaaaaatcacgcacaaccctttggctggtatatagccgtcttaccacccccatacctgtaccaggtatgggtctgtcccacataacgagagtttctcacaaaacgagagatttctctttttaagtatctttaatatggcatacccatacaaaaggtacatataccccatatcatgttctcaaccctttggctagttaaaggagaaataagagtataaatcaataataaatttatagttaaattaattggctaataaaagaagtttcagatatcttatatagaaaagtaaagaccatatttatgaaagagatgtatatagaaacatcaacgttctaccacttggagaatactcaatatttcatcctaatatattaatagtaaataaaatagacctcctttagactatatatcccctactatatcttttgtaagtattcctagaagtgacaaaatctctattttatgttcatgtaccttttgtatgggtataccatataaaagatactgtcaagaatgggccctaaacaagaaccttggtttttgttatggtctagtggtaaattacgctgtacgaaattcaacagatacctaaaaagagaaatctctcgttttgtgagaaactctcgttatgtgggacagacccaccctagttaactcagggtgggatggtaagacggctatatggcaagctgctactaagtatgtgctctagctggttacaagcttcgcaaattgaagggataacccatatacatcgccggttcagtataggcgatttgtttatatattgtaaaccgaaccatagtgaccgaacacaaggaatttaaggtaaaagctatccattagtggagttgttcctgaccctccaaatttcaggattggcttaccaactctgcaagaaaggtattgaaagggaataagagccggatgttgagaatgttcgacatgtaagtatcgtaaccgagagccactcattctccgcagtatagagtctctccaagtcaagaacataagcagttaccgagcagataatgctagagcatgccgtatgcacaacactcccaaaatggcaagcagtaatttatccgggaaggagcccttctcaaaagccttatgttctgattgggtttgtatagaaccacgcacgggtacacacaaagccaagtgcgctaagcccaaagggccaaaactaaactacattagtcctctgccacaggtccactttgcccttggctcatgtagccaataatatgtccttccttcatccaatatctgtaagtcgaggtgacggcggaaacaccacgaatgtgcgtggttttgcagtgcacgtctagcacagctacccgcctaacgacacggtatagatacagagtgaccttacccgattcggtttagcgtgactttccatgctctcatagtatggcgggtccatcatgagggaagtcggtgctataagagggaagtcggtgctataagagggaaggctcatatgttcaaccaggagtctatgcagtcgaatgcctgttcccttgattactattataaggcacgataggtagcacggcaaacaacaacacacatcaatgacacttgttttcagatcaaaggaattcagtgaatttcctcaaagacccgaacaatgaatgatttccccttgataaccaccttctcccctgggatcctccatgcgccaataccctctccatcaaacccatctttgattgatggtacgtcacctgcatcagggccgatgacatatttctcctcccatccagaaccccactcttcccttctcgcactaacttcacctccggacctcttgagagaccaggcaccggcctgatccttctggccggaatgtgtctgagtctgctggagtgccaagtaggttccccagatccgtcccaagaagaccttggtcacagtcacctctttttgctcaccaacggccagaggagcatcatctgactccagaatccaggagattcctttcttcgctccttcaggaccctccttgaagagcagctcttgccaaacttcttcaaaagccgtcatgggctcaccgggcagatccgcccggggcatctctccgcactcgaggtcggtaccatcggcctggggactgaagttgccaatatccacgataccgatctcattcagggagtccaactcgcgcgtgaagagcaccttgactgtttcttgtcagtgaccttcaatcaaaaggtatttccgacaagtaatttcagggcaacgaacgtggaatttctttgggattctcctcaattctagtaccggccattgcccagtcaatggcgccggatttcttatccattcgcaaatccacgaaccattctcccacagaaagaacaatggtatcagtcgtctcctcaggaatttcaggaacccatcggagtgaaagacgggttgagaaaccgcaaattgatcctagttgagcacccgtggcagacattgtgtatgtgaagtggtttgtggtttgaatgttcacctggccagtctaattataatcaataatcttatcacaatcgccgaggcaggactcggtaagtaacaccagttgagtttcgcatctcaatctaactgtcgcctgaagttcctgcatcaatcaccccccccgctgccccagcttacgtaacccggatgttcgccgaatcggggattttgaagcgattcaacgattggcgatggagaacggtggggtgattcaactaatggtgttatctaatgcacttcgagttcattggaccgctgtcgttgtaagtgattgagccaataactgcattccaaagcataaatcggttatcaaaatgtctcgaagagtttcgggccattagcttccagcgaaatgtatcaatgatttgcgtttttgctatttagtatctgataaactagaggttctttactatcttctgtcaaatatagagccatctaagataagctcgattggcactccacaccaatatcaccatcaattccatcacaagtaatcactgatggggtacacttgccggacgaggtgccatgaatattctcgaacttgatgttcgtgaaattgacagcggatgggtactcggcgcaagtggtgctgttaatgttgaagtaatattggtcaaggacaatgggactatcggtatttctaacgtgaatgtccttagaggtgatattgttgatacgaccgaagccgacgtcggggccagcctaggccttagctccggtctgtgtcatatcagcgagtgcattattgagaaacagaattataactatcttacctagctgttcaggatagtaacattctcgatccaggcgttcttaatgatatcctcgacgccagagtacttctaatacttcctatactcatgccgtcggtgttattgtaccgcggggttctacacgaaaatattggcatgtagtataagctttctacctagccggttggaaggattcaacaccccttagagtttcttgctagcctgaactagcccatagatacagctgacgttaccagaccaccaagccacggagcgcaggaagctcgcaggcttggttgtgatgtttgcgtagagaatactatacaccacacgcgaaatcgagtaccaaacaccgatggtgttgatcgtctcgttgggaacaccggcaaacagtgaaatcaaaactgcattatgtaatcagtatttctgccgaggtccaggcacgaaaggggcaaaagcttaagcaaagagggggatcttactggccgccacaaacagagggtagccctcctgagcattcgcatgggccgcctcgcgacgcttcagcttattgagcgtgtcgcggctgattttgcgagcctggaccgccgcctcgccgtaggtagtcaggtcctcgcggggacagacattgttgtcgatgccgaggcgaatcttcgcgccacggttgctcatgagacagaaggcccaaacccagtttgcgatgaggaagccggaggcgtggttggcggccgtttggccgggggcggcgcggaggccaatggtggtgaggagagcactgggttggttagcttcgttgtcggttcagcgcacgattagggtcactcacgacattgtgtgtggatttgtgttgttcgctcaagatgcggctgggggaggtcttataagcgtatgtgagagagcgagagcgagagaccgagggatgagatcatgtttgtcgatcggatccactttcagcagtcaggttgtgaagatgagatcacggctgtctgcacttttgattctgtgcttgtgcttgaaattgggttgttctgaacatggcatttgttctgacgtggcatggaactgacacatgtgaccacggatccatcgttcagcgcttgcaggatttacatcagcacatcgaaatttgttctagagatcacgctggccttggaaatctacccatgcctcgaaatgggcacaaactctttcgagagaagccccatcaaattgcgcaggatcatctataattggcgacaagtgtttggcccagatttgatcggcgttccatccccaagcctttctttcccccttggatctgcaagaaatcctttttttatataggcctcaatgtacctgatggcgtgagagaatgtggtattaggttcagccctgtgagtggttcgatagataacatatccacaatccgggagcggcgaagtctgctccgcagctcgccatggttgcgcgtgactggtctggccgaagtcgcgagaggagaagagatcgagtatatgaggagggaaagctccgagctccaacatgcctagagctagaggggctgatcccaagacggtccgagtcatgctcttaattcgagtgttgtgttgatataatcaattcactctgaaatcatgcagctgttgcattcaacaaatttttcaatccccagccagtccatgtaatcaacgcctgtcaacggtaaggttagattatggaaggtggagtatatcacctctgcttcattgttcatttagagatgatcagtcactgttgtttgacactccacggtacggacctacctccaagttggagcaattcttgcaattagtacaatttatcatgttggaactttgcttgcattgttcacaatccttgcagtcactgcaaaatgaacagtcggtcagagcacagacgaagccaagcagaaagggaaagcgggcggtacacagcgagaagttgaaggagcgatgacaaggacagagagccttgaactgaaagagtagaggctagagctaagagcgaatttgttgtacccatccgatataagattacgattgtgcgtggtataggactacatgattgtccctcataactagcccaaattgcgggcgaagacccactattttaagattttgacctgccacgccaccatcgactaaaggaacacacaggcctttttttccctcatttctagcgccaaaacattgggggcggcccccggtaagaagtacgaagtagagcccctcggctgcattgtggcctgccattggctaatatccgagtcttacctgcattgggaaatgatcaattggtattcaatcggcatgattgactcacaatatgtagaacccgtacaatttgatgcgaaatggggaacttcatctcagttgaatacttggcagctggtcttgaatgtatacctccccgaaactcatcttgacattggtatatcctatttttacgtccatggatactccgtagttaccgcccccacccgggcagtgcctacaatgcagtgatcggcgggggccattatttgcacataaaacagactagcttactagtctcgcatgccgcctttttaactcaccgtttgccaggaccgtaataactcatgttgtttccccatcgcaacacttctgccaggccgattccgccccgtatccctttacctttgattctaagctcgcgtcaatcgtgtcttaagcgcaatgtccgaggaatatgtaaagggatacgctattcgtcgaaatagcacatgcgagaccggcgaaaaccaatgtacgaaaaaagcgacatggggtgactaccaggcgtgttgtcctggaaattctttctgctttgattccgatactggaattcccaatatcatatgttgcgacaatcacaacaattgcacgcaagctatatcagtcgctccagcatgtgctgacaggagctggaatctattcgacgggaatggttctttctgctgtgatcaaggagagtcgggatttcgtgttgaaaatagagttttggttggttgctctgaggcaacatccccgggaaatgctagtttcatcaccttgccaacgatatcggtcggttagtttatcgcataccgacgacattcaatcaaaatgaccgattaacactttctcaggtaaatctgtcgcaagttcaacagcgacgtcttcatcatcgccctcttcatcatcgccctcatccccatcaacctcgaaagtagcatcaaacagctcgagtgcttcctcgtctaccaacgtaggcgcaatcgctggtggtgttgttggcggcgttgctggcgtagctgctatagctgccatcctctttttcttcgttcggcgccgcaagcaacaaaatacccagacactagcccagacaccgtattcgcctccagtgtattcagaagtcggggctggcctaccccgaaaggagcttgatggccaaacaagatcagagatggatgatacccctcttcgcgaaccacaagagttgccgacaagccattgattatgaaatgatttctgctttcaataacagccctgattatatgataaagcacgcttgactgaacaggggctcggggtttttcaatgcattccatggatgatgaccctttagcgtttctgtactcttatcttagctcccggattttactcgagcatgaggccggaatgagaattgtggcctttgcgatcgtgacgacgaaagaacgctactgaaaaatttgactattatggtagtaatataaaatatactaagcgatggggaaatggatcggtgataccttacaagtcaaatacacaaagatatgactgactgggaagtgatacgctttcgcaggggggtgggtgaatctttataaggtagactgttgtatgagtggcactttttacaccgcctagccaacgccaaatcaagtctgcaacttcattgaaccgcccctgttgtagtctggacctgctccagagactctgcaagagacgtcaagcctagagtatcaggcaaattttctctcatcatcccggtggatttctcacagcgacaacatctaatcacgatgacccacgaattcgagtaggtaccccgcctgcagatctagaatatagaatatacccatactaataatttcagatgtccatatgctgttggtaatgtgatcaagattcacttggagacaccagatggattggaggcaacagcagatgccaatatcattaaagtcttcaagccgttcactctttcctctgtgatgcttattcggatggcctgctcatctttaagattggaaggcgatatgattttgaagctctttgatcggcgatttgcaacgcagcttcgggaagacgaaaagattcggccctggaacccagatacagagactgagtaccgtcaatttatccttgatggcggtgcatcagagtttgttactcagctcaacgacggtgaaacacctgaaggcagtacatggagtgcggctatggacgaaacttatcttcatgatcacatgttggatctgtacaagacataggtccaggtatatagcaacctgaaggagattcaaggcaccgacataccaaaactccttgcatccgctattatgcctattccctacccaggtcaaacgagcagcgaatataccgatattcctgggatccttttgcaatatatcgaaggcttcccattgaccgatattgaggaatatacaccaagagaaagctggcaggccatctgtgaagacgccattcgagttatcaatcgtatcggtgatctgggaatacttaatgaggatgttaaaccaaggagcttcattgtgcgtgaggacgcggggaatagattcaaggtgaccatgatcgattttgcgctatgcaaattccgtcaagactataaagatgtctatgactgggataaatggaaatcgatacaggacgaagagggggcagtggggtatgtcatgcaaaggcgtttaaaaggtggattttcttaccgtcgatctgctcgatacgaaaagctagatgaggaattcagaaagggtgaatgagttgagactgtagggaaaatagaaatcaatatcaggccgaggaatatagcgtctgtatgtaacgttcaacctgacctggattcgaaacctcgactatgaggccttttagggaccatcacgacaatgggttttttgccaggcagaaaattaggtaataaaataataccgcctaactaactagccaggcgccaacacacggtatgtgttttcgacacgattaggtgcgaaggctaagtataagtaatattgatgcctgataatcccgaacacccttattctgccccctacaacgttggtggcgaaaggtaaaatctactgttcaatagttctgggatatcaatttgaataacaccccccaataagggttcttacctatgccgtgttgttgctttacccgtggcattctgttgctctgtcccagatgcaacctcgacgcctgtatttaaacaggagagcaagttgtggggataaggatcaaccatacacactactccagtacacaagtaccagtgctttctttatcaaagtatatagcattacgttcagcgcagagcaggcgatgtaaaaccatcatattttggtagccgcagatattatacatttctttattagcattaaaaaacaagaatgaaaaaagaaaagaaaaagaagaagaagccagcaaatccataccgccaaggctatcaccccaatttcccttccatctgccgactccagagtttgcggtcgaatcgttgttctagtagcgcctgcgcatcacccgcgtacatgaaaactctaccaccggtctccttgggctccttctcgtctttgaagtagacccagcagtctgcaacttcgtaggcattcgtctcatgatatgatagcttctgggcctcttcttcggatcgcacgaggtacgcagatcccgtcaccacatccccttgtttactattgatcagggcgggataatcaccccatttcgcaacagcgtaactaaatatctctgcctcgcgaagttgcggctcctccggcaggtcgaggatccttttcacctgggccggggcggttagagttccgtagaagaagtaatacactggaaaggcaggcgggaagtcgactggctcgtcgcgctgcgcaaggtagtccggtggtgctgaccggagcatagtatagaaaggtgatagtggctcctccttggcggggaaaaggcctggagaccagggtgctccggagtcctctggattcatgaaggctgtatgatgtgaaagttggacaaaatgttgaagttagaaggctcggatacggaacaaaggaataagtgggtgctcaaagagaaaccagaagaggcagtaataataatagggttaaaactaaactacattagtcatctgccacaggtccactttgctcttggctcatgtagccaataatatgtccttccttcatccaatatccgatatggtgtaaaaggccgtgacggagaaatggccacgatatgccgttgtataaattcgaaaactcgtggtgttttcacataggcattattttaggccattaattgacactatactaatttggacactagcgcgaaaatcgatcagagggagggtcgtgcagcgcttctatcatcaatacgaatagaatataaatggctatgtctcctacagccctgaccgaaatatttctatatcaaacgcctaccaaagcgctttgtaaaatcgtcatggactggaattcgttcatccgagagtcggatccgcaggttcaagcagatctttcgaaacccacacgagataaaatgcgagaggctcggaatgcctttcgaaggttatcaacccttcattcttcttatcggacggtggctgaccatctaatagatttacaagtcaccttaatccaccagatcacacctattggctgcaatccgagaacctcacattaagagtcattgaaggggttttccgctggtatcatgaaaactacagcttaggatatcaatccggctttctcaccatgactcgccccccccccccggcgagatagactagcattttggcaatcagggaccgagaaacaatttgttgagatacaaagtataaagaaatggagagcgttgattgattcgaagaagaggagagaagagagaaactgcaaaatacataaatatggatcgaaactatgtaaagggcacgggtgaggtagacgtgagacaccaccacaacagttttcggccccctggttgtgtcgctttccaaagtttgtcgcggcgcttattgcttgaaagcatgcggctaagggtttcctggctatgcgagacacctaaagctgccagatcctcgggtagagcgtgcaaaaggaactgaagatgaatttgaaaagaattactacttagaaaatccgctttaaccacctgggcaataaagaggtggcggtatttctatggcttgaattacgcataaggcaatagagctctagcagcgatctcgtagaacaaatgtgttacgcacacaacgtatgactataatcgggatagagggtataataaagctgggaaattattatagaagtatatacgtacacaccagggaagttagatcgatatcaccgcgttgaaagttcgtaaggtccttggcgggaggcctgtgaatgttctgacatattctgcgcgctttgttcagactgagaagtctgttgggcgctttgcccgtattctgaggtttgtgttgaggttggtggaaacgcaatggcccgaccgtagtccaactcatggaacctgctaggtttggtgtctggagcttccacgggcgccgtagttattatcgagggaggaggttgttgcgaagaccggtctgccgctgcactgtcctgactgggagtccgcttatatttttgacgatgggagataaaccaataagctgcagcaacggccgccaaagcagcaataccgcagccggcgccaatgccagccttggcgccggttgagagaccaatgctaccggtcgaggtcgtcgtagtcgtcgaggtcgtcgaagtcgtcgagttggtcgtgggagaattcggggatgcaagtaccgtccaagagttttcccaagtaggttcccagctattcccagaggatgtgatggtggtgtcactatcgctgatgtcgacaacattctgaatgtaagaatagtctggtccaggagcttgggctaaaaaccaggatttcttggaccagttgacgccgacgaaagcagcctgtagaaaggcacgaccaagagctggagtggagtcggtgcccatgcatgggaagtattgtgtaggactggtcaccaaaggggcttccagagtaaggttcagaagagcgaaagggaccttgatggtgatatcctcagtgttaacgccattcttggtgaaggtgaaacctaggtagctgggggatgtcacaattttggtatattgcgaatcagttgtgtcccaaaagtagagacccagatcggaattatatgtgataggcagattggcggcaatggcgtcgcacgaactttggggtagatagatatatgggtttgctgggtccactgctaccgtgaagccggaggtcaaagaggaattgctttgtgccagcaatcctgtcatattagagaatttccagggcgaaccaccttttgcaaccccgatacctatgtcgattaattcaatcggaaacttcccactgtcgactggctgcgcagagacatctccaaagactcgaccttggtcgtatcctctaagcttgagagaaccggatataccgaacgaggcagagccaatatgtataccatacgaataggacgggatttgtcctttgtcgtagagataactgttggcgaaagtggcattgatagggggcaatggggcgtctctggtgaatgtttggttgatgtccggacatcctagagaaaggacacccacttctaaggggtagttcttcccaccgggatacgtctgatatccctctaagactgtagtcaaatccgcggactgcataaccgtgcctccaagatccatggagtctagcgctcgagatgtcacggcgttgataggcactgcgttggtatatcccaattgcatgtctgaccattcacctgcatttgaatcatatatagatgtatcgttgtaagttgatgaatcgtggatgtcgaaaagaccagctgaatctgcgtaacagataggtgatatttttgtcgtgttgtcgcaaattgttaagaggagaaccgtgctcgcccaagatcctccgggatataacgcgatctttgtatcgttgccgctaatgcttacttcgacggcctgccagggaccatcaggtccaaatgacccagaagcctaggtcatgctccaaggagctacggcggcagcagagctatcgatatacaaactctaaagaagggttatggcccagagcaatggattctttatgccttattagagtgaagtgtcagccgaatctctatatcgctgcttaaatctgtcacgtggaatcaagccgaagtaaacaaagttggcttacctatagagttcaaagggaacgttggaatcagaggataggaaccacggttcgataacggttcgttcggcttttccagcggatacttcgagtaaacacgcgatattcactaaaaatagaatcagcacgacttgatgccagtgaaggaagaatactccgttgttaaacaggatattttctcagcaaccgccggggacggacgcatgtgaaaagccaggaagttgagggagattttggacggagcccactacggaccctttttggtattaactgttttaggtatgggttcagctggagattgattaaacacgtactaatgtacagtccactaagtacgagtatggagtacaataggggcagtaggcccgatccccttcccaccatacgaacaggtactagtagcacctgggcaaacatatacagaatccgatttgtcattgctaaacaaaatatggcattgggctgatacctgggtgcaatttcgtacactgtccgtcttgtaatacctgctaaatgaagatcgactcggtccattactcgataaagcatagcattgcacccatgactcgtagtcggcttgcctctacaaggggtaagaattgacaaattgcaggacgaaatacgagtataccagggtttgtgggctataataccaatagtgataagatccctatattttggaaggaaaaataatatatacccatagacctggtttctgttgtggacagaatttggtcaaaacgtgggaatcggaactggcagatctgtttgataataagcatggctttgttcaattgatgtatcttgaggccctaccctgcccgctgcccaggccttttccgctgcggattacgctgtcgtccagtaatggtgtttcgcccccaatttgtaagaaattagtgcggtttgggaccaaatgtctcgctttggttacggagcagattcggggtctcctgtgcttaccccggcggttagcttgctgtcattttcaacctggctaggctgacaggtctaagacgaaggatttcttcactcacaccacgccataagtaaagatacgatattgatggctaatcgctagactttgcaagcgatcataccatgactgtaaccaaacccctacgcgctgtatttgtcctgatatctatcatattactggtgatctttcttcggattcgcggcagttttggctatcttaggccataggttactatccaatttgggaaagaagttgactggactcgctttgcgtatatacaatatgtcactaatactgattatctgtgtaactcggtcatgctatttgaggccctgtatcgtctcgacagcaagcccgaccgcttaatgatgtaccccgattatttttcggtcgctgatgacgataatttgagggaagcggaattactccgtatcgctcgggataaatacaaagtcaagcttaagcctattcaagtttaaagcaggaacggcggtgaccgtaagtaatttttccctgcggtatacactatggtcgctttgccagtaccttccttgaagtgtccctcttagctaatatcaaccacagaaatatgggcagagagctatacgaagcttcttgctttcaatcaaatacaatacgacagggttttgagcctagactctgactctactatcctgcaagtctgtttatcacaatgttgtcttatcgttcctactaacctacctacaggctatagatgagctgtttctgctcctaccttgccctgtcgcaatgctacgagcctactggcttaatccagacgactgagtcctaagttcgcaattggttcttgtcgaaccgtctacgtttgaattcactcgcgttatgcaagcaattgctaatgcaagctctggcgactttgacatggaaatcgtcaacgatttatacaaagacagcgctttcgtcctgccacaccgttgctacgatcttttgacaggagagttccgcggcaaagaacatgctggctaccttggaaacccgttggaagaatgggatccctatgccattcttaacgagaccaagtttctccatttctctgactggcctgtgcccaaggtttgtgctaggattccaaagtcgacccaagatgctaacctgtgtgaatgatagccatggatcgaagctcctaaagatattattgatgaaaagcagcctacctgtgatttcaaccctctgacctaacaggaagatgactgtcgcgctttgaacatttggttgggcatttacgacgactttaagatacgacgaaaggttcgtcatattagttcctctgtcacaactatcagaccgtgttgttttctaacgaaagaaatagaatgtatgtaaaaccagtgcagcggaagcgtaattaatccacgagatgtcttcactatctcagcatactgctactgcatacgttagatgggccagtgtattctcgcatcgttggatgctagacgtctatcgattttccctcttatttctccatcgcgatgtacatatgctgtttttatttgcgagccagtcatttgaagcatgcatttcaagccaaggtacgtattgtaaaagctgtaacgatactgttctggacatcatactgcatagtatcattgggtcatgcgccgtcccctttaatttaaaggagtatgtcgaatttcgtacagcgtaatttgccactagaccataacaaaaaccaaggtgcttgtttagggcctagaggggccatatcccattcttgacagagtacaatatgtacgtctgcctccgtagcagcctcccatgggttttcgacgatatgagcgtcaaccccccgaatatccattgaccaaatttagaagggttcaacatatgtgaaacatcctgccgccgattatgcacagtagccgggattgtcctgattcatcttttcattttaattaactgataattaaaaatttaataaagtgacattacgcatgaaccaaattatgcgaagcccttgatgaggtggaaactgccgatcttgtaccccaatgggatggatgtaaagatccgctggggttcggcccgcccgcaaatgcattggtaaagtttgtggttcgttacacttactgtacaggtatggtaagacaatttacagcatcacggaaatgcacaggtaggcagtgttcgtaacatattgcgtgtaagcaaattgagaccaattcaatgcgtcaacggcagctggaccatcgtagtgactgggaatttgtaccactgtaggctcgccatctataatgagcaaagacacaattataacaaaaaggaaaactatggtaattgtagctcgcatggtgggtcctgtggggaaaggacaatgaaaggcttggcaagggttcagttggcagagaaatactttaacccatatagaacttcctttttgatataaaaaacagtgagtattaaacagagcaataaaggttgagatatacaggaggcaacgtggttgcgttctggtattaaaaattgtcactgagcccgctgtactaaagggctgggtaagcgctaacgtgtatatgcgatataaagaaaaaggctaggaagtcggaaaaaatacaaagtattcgtatagaaatctgggggccaaaggtgcgagactagtccatataagacacgtaagggtacttttgctatgttatgattacacctataaaacgacaaaattagggataatacctacgcgctaatgctatagggattcgaatcccagggtccgagattggatcactacgcgctgggactaatgtgctggacagcctcccctgcttggtattgcaagatgatccagataaaccaacaccggtttaagaagaggtgcgagcctagtgagcgcgactcctagtgcccctccgacttttatcgtctcgttccatgaacccctggccccgaacgctcgtgtctgtcctctatattctgtctgtgatatagacatcagatgcaatatgagaatgtcgacggggatatcctgctcacagatacgtcgaagtcgaatcggcatcatttttctgcttttcgccctcctggatttcagctctgcagactcgcttccatgggtgatgagatggtccccaaaaggatttggaccagatggcccttggaacgctgtgttgtgggaaagaggagatcgctctgtatccaggggggtggtggaacagctacatcattctttcttcctactgttcaaatcgcacgttaacctcctactgctatgccgatgatgccggcaccttcgatactcaatcgagcacttgggacaacacatccattgattatacgccttatggcttgtgggggtctctggatttctcgcaaaccaacgacaatccggtcttcggaagggctcactgtgccacagatacgatgagtctatatggggtagacatcccaaggtccaatctaatcgctgtccaacaaggctaccagacctaccccggaggacagagttatcctctcgaagttggctccctagcgctgggtgcccaatacatgaaccagacatttggcaacatcggaggaaccattgcccctggctggttgtggaacgggtcgaagcaaatcgaatcatattcatacggcatgcacattgggttatcctcgctaggtattccgggcagtttgatgctcggtggctacgatcaaagtcggctgctgggtgacgcttctgttcagcctcacacgggcagttcggcgcctatcaatctactcgacgttagcctcggtgtcgtgaccggtggttcgccatgggattcttctagcaaagaaggcctacttgcacaaggaaactcttctcttttggggggcaccaccgtcatagcagccccagtcgatccttgcatttacctgcctcagggttcctgtgacgccattgctgctgaattatcagtgactcacaacgctgatttgggtctttatatctggaataccaacgaccctcaataccagaagatcgtcacttctcccagctatattgcatttactttcaccaaggataacaccaacacacaagacctttgagatcacttgagttgcaacatgctctcgctgttgcatttgaagaggatagctttgacgaaaaaaatctcttagagaataagacatcatctctgtgtgtgcaggcatggttacagctgatgagtaaagcgacgtcgttcaactacgacactacacaaggtatgagttaagaataactgaaccgagttctttcccgatgctcatggccaacttgcgactatatgtatttcctacatgcgccatgaggtacttcaagatgggctcacatcctcgcacagtcagtttaaagactatcttgaacgatttccaccttttgagtactcggccaagaattggggctatcatgcacgcatgtcccactcaaaagtgaaggaacaagtccaagcttttgttcagagcgagaacgccctttctcaatccctctgggtattgtttgccgatcggtaccttcggcgaatcaagcaggggtgctcaatcagagcctctctactatatactgcagcatacttcagccttggagaatgtcttctttactttctcgccaatagtgtctcccgtgatacaaaggacgatgatggccagactgcattacactgggctgccagaaatggacaagtggaagcagctgaactgctattgaagcatggtcttgaagtctacggggccggcaaagaaagaaaaacagccttgcattacgctgctgaccaggatgactcacaattgataaaactccttgtgcaatatagggcaaatattgaatatacagacatcgatggccagacacctcttcttaccgcggtgcagaatgtgaagcttgagctggctcaagaactagttcgtctcggggcctcaataaaagcgatagactctatgcgtcgcagtgcgctacacttatcaaccaaggggggaagtcgcagcattcagatcaccaattttcttttagcgagaggtgcttgttctgagatatgtgacgtgggaaacatgatgccattacattacgccatccgcaagggatctaaagacacagccgaagcctcaattcaagcaggagcatgtgtcaacgctggcatcgcgaggaagagatggaatcgaacaacaaaagctggccgcggggtttatgaaccttcacctggagaccaggatgcccctggaagtaagctcgttcatggcctaactccactgcattgggcagcactcataggccactcggaaatggtcagatatcttctctccaaaggggccgaccgaacaagcgttgccagggtggcgacacaccgttgcaccttgccatacgcgaagatatcattcgggattacggagatacttggaactcacccgaatggcggattgaagttctcagcgacttggttggggctggaagtgaagaggcttaactatatagaaccacgcacgggtacgcacaaagccaagtgcgctaaaccaaaagggtcactaaactacattagtcatccccctcaggtccactttgcccttggttcatatagccaataacatgctcttccttcatccaatatccgatatggtgtagtggctaacatcgccgtctctcacacggcagccgggggttcgattccccctatcggagtttaacttgacatatctttttagatgcggttcgttttgtactggttttttatatattgtacacgcgagaagaaagagaaggcggtgattgtttcatagtcatacaaaagttcttgtcctgcatagttattacatgttgctgatatacaaaagtacgaatccttactactgacagtactccgtacgcataaagacaaactaaaaaaatcctctgacccgggatcgaaccagggacctcaagataacaagttctcttaaagaatagggcaattacagtcttgcgctcttccagctgagctatcagaggggttgatacggtacaattaggtgcctctaaaatccataagtttgaagttgatccccaggttatcggcagtagatcggcaatagatcgggttttgttatcgatcgggattttcttatcggtctccttatcagtaagtatggcggaagcgtccacgttgacatgtgaaactggagatttcagttgaactattttaggtcgttttctatcatttgccatctaatctagattttcccccaaaaggccctcaagttcccatccggtgtcaacttcaactcagtgcacggtgataatggactacgctattttccccatcccggcatccattcggcgtcgactaccccgcctatactctgcccgagccgtccccgagaccaccgaatcgagcggggatcagcaccgtggacttgcatcttcgtcggaacctcatctgctatgtcaaagccaattgtctgcgtcagtagtacctgagctccaagggccttccatggccagcaatgacttggatttgttcgaccctggccccgtggggtcagatagtccccgagaggacatggggtccccgacaaaatacgaaaccacatcggggctgcggtggaatcgagtcgtacccggtgagtcctctccggttgatgttcgaagtattcattgcatggtttttactgacggttttcgtgaagcgttcaatcttctccgaaatgcggggtatgaagcccagcagccgcaggctgatggccgtctggctcgatctctctactttaacgctctcatttaccttctcgatgctttaccttccgacctgaccaatgaggagacctccatgcttcagcaccatatccccgagccggtgaaagtcgagttaacaacatactcccagccgtccgggtatatggaaggtgcgaatcatacaatatgccctccgccaagatcatatctgcataaatttcttgcctcaatgatcttgcagttgttcattctattgcggttccttctaccatatgcaaaggtgctattgcgccaaatatatgagtatgaccggacacatcgcatcactcggcgtatcatgaccatcacactggaggcagctgacgggttggggaaaggcggtgttaatatcggagctgctgttagcaagttcaacgaagggcggattggcgctgctctcactaatttcgcggtttggtggatggaaggtgtagctggaggcatatatgagggggttggtgaggggatgatacatttgggtctcttggggaaagaagcggatttggatagacttcctttagagccgatgagtatgtagatagatagatcataggtcatagatggcttatattagattacgtcccaacgagagcaatgaacatattcatggagtatgacatcacatcttgtagcaagctccttagcaatgcccatcaactttatagtgatttgcagcgatgtcgagaacactctaggccgtaatagcatcgaaaccgatgtgtggaatgttggcactgatgatggcaaactatgaggttgatcgagtcacctagcaattcttccagtgattggttatcgccagacttgagtgcttgttccaggtctccgtagagagtggctgtcaaattacgaagacccatagcgctcagggctcgaaactcccttttggggggatttgatgcctgtatgccttattttagcaccgctctcgataactaccgccctatatgaagccttcggcctatacaaatttcggcatcttcatatttttgggtggtttttgagttccaaaaaaatttctactttgagttgactgccggttttctcttcttctttcttctttcttctttctttctccctcggcataaatccgggtaagggaggtggaagggatcaaatcctccgtctccgctggctccgccgaggtgctggagatctagcacgcttgcgacggactggctttggttttgcggctgcgataataacagggtcagccacgaaacaggaatgtaagggtgtgtggattacctcgagggatgcttcgagcggcggccagatcaagcataggtagacggcttcaatgccgagacataaaggaattctaggatttgtgtcacatttgacgcccattttctactattatggtaattcaggtatttaaattttctgccgttctaaaataaggcatccaggaatcaaagcctccccaagaggagtttggaaccctgagcgccatgggtcttcgtagtcaaactatcaactcatatgtacggagtaaaattagggagttactatttatatagggaattgttgctcacacccccggaaaatcggctctagtggtccgaggtctagttggacttctgtgactgatcttgatcttctttcaccgctcatttcccctccattcagccaatcatccatatttcaatattacttccatcaatacctgctctgttcacgatgtgggaaccagtcgctatcccctttcagaactccaagcctctgcctactctacctacaacagatgaaattcgcgcttgcaccaatgttctgtgggagaccatggcctccaagattgtggcggtgaacgacgatattgttgcaaaatatgggggtactgtcaacgcctgggaaggccaagctttggtttaccttgaacgatacgtcccaggagttccggcccctcgactatacgcgatgtactatgagtccaaacaagtcttcatgatcatgcaacgcgttcctggggttccgctgaattccatctggccatcattggtggactctgagaaggacgacattatcgcaaaacttaaactaatatccgacacaatgcgaaaggccgagtgtccatggcccgactttttcggaggcctggacgggggcggcgtacatcactacctattctatagccagcatggcgataaaaaattcctagggcctttctctggcgagcctgccttcgttgcggcccttgtcggtaattatagagccttggtcgaacgcaataagcgtccagacttcaaggctcgcttttacgaaaaacactgggctcgcgtccttcaaggtcaccggcccacattgacacatggggaccttcagcagaagaacattattgtcgcagagaatacaagtcgcccaaacgatcaaggtgggcgatcatttgatgtcgtactggtcgattgggagaattctggctggtttcctgacttctgggaattcttttgtgcatcttccccctttatttttgactggggagaagactggtcctggcgagtccaggagtttcttcaagtatggccagccgaggtggccatgatgcaactgattgacagggatctaggctggtgaagtacgttgctatgtttagaacgaaatcgatgtattcttaaccacaaagaaaaaataaagctcgtcaacttccatctcaatccttcatcagaaggctctggccgtcatctgcgctccgcaaacaggcatccagagtgggtggccccgattcttctgggatgcgatcgtatgaccgcaaaccgaaacaaaccgatacttcaaatttagctatgtaaaatgccttcctgtcgcaacttcggaatcgcaatctgatgtgtccattcattgcactttatgattggccgtcgttgttcgcctggcccgtaaagctccccattctccttcgtccaagtgatcttattccgcttgcttggatcatggctccaaaagtcaatcccctgctgcttggtcggtgtgggcaaggcttctaagataccccttattctcggaaaatcgactttgtaaatccatccaatctctgtggttctgtgaaaatgcgcggacgctccaggagtatagctttctttcacatcgaagtacatgccctttgcggcgatgatgtcgccggtgacatgaaatagatctccttcgaaaatatccgggtctgtttgaatgaagacacctgtgtggtatcgcttcgcagggtccagaggatcgggggctgctgtgtcgaactctggtgtgaagactctgtaccgctcggatgcgggaggattgtcggacatgtttgatatccagataaagacgtgagaaggacgtagcgttgatgggggaaaacagagtatatcaaagtattgagacactggatagtgaaaagatggtggtttcagtcaggagaaaagaaaacaaaagtgaaaacaagttcagtaattacctcctcaaggcaagtactgtaatgggaaggaatgtaggtgatctttctttttagaatgggattcattcttccttttataatgtcttccttctataatgaaagtatacatgacatattttaagtatcatctcgcctcgtctgaaacaaaccaattggacagcaatccccgccaggtctcaaattaggccgagtacctcttccaaagttggcgcccggagtactcctttgtagcctcactttcagctctctgacgctagcgctggacttgcatatgtactatgtccagccatttcccttttatggagccaatcgtcgctcgatttctcctctagttatattctcaaaataatcacactggctttgttcaaatgtgtatttattatcgtgtcgtaatagtttgtaatgctgaattaagcaattggacgacagctgcggagaaaatctacacatgtctactccgtatagcctgcggggtatcggctacgcgccggatgctgtggaacgtgccgtctttccacaattcgcggttttgtttcgccttgaaacattggctggattgaagtggtcaatgacctctaagggcttgccgccagcctgaaaagcgcaaccttggaaagagaatttgttttgtcagtcgatcaaaagtggtcctagatgggcgtcaacgaaaatgttcgacgttgacaccgaaaatagtgtcgcaaccaaaacgtaccctttccaggctgagccgctcattgcgattctgtccaaaataccttgccccggctcatctcccggtatgattagacttccggtgtcaattttattatcacccaggagcagtgggtgagcgttgaggcggcttactggtcaaagatcattggctagcacgtttcccccagggtgagcaactgctggctgcgcccgctgtgctacgaactctgtatggatccctatagaagtgcgctttggtgtttcatggatgcattagcgaaacgcccacgatgttcgagctcgacaccttggcacccgtgaattgccaatcatttttggtagccttatctgatccaagaggaatatacatgccagccgaggaatacatgtcagctaaggaatactcgtgtcagtcgatcagccctgtttgtcgatccgtgaggggtccatcatatgatatgcatgttgacatcggggcctttgggcagatagattccatatagtcgaggacccccattcccaacgaggaagagacactcgcacaacgacaaagtcgctttcaccctcggaggactgacaagcattagtcccagacaatacattcatacatcgtatcttacccggttgacagaccacacactggaatacagtgtacctttacattatctctgcaacttaaataatggtcaataagcatcagttccactaaatattttattggatggacctggcggatggttgcaaacacaaaaaagttcgcttggtctaattgtgtggactcctctggactgcgccaacttgagcggtgaatagatactcaaccctagttcagcctgttgagtcttttcagttgccaaggttgatttgtatctcgggaggatacgtgatctgggctcaaccccataactgatcggtgatggtagaggatttgaataatatcgattgtaccgccaggcccaggcgacggcatggatctaggagtcacggttcgactcgtccgttagacaactgattcaaaaaaagggagacaggagtgtgaaaatgcaattaattgtggtgcacggaaatatagtatcttaaacgggtcaatattattctcgatcttggaacataagcctgacttggagggtgcgtactatcactacaacatcctgttgttgtatgtatgtcttctgctctgcagcgagagaaggaagatagcagggctttacgagtcgatatattctagaatattagacttccaatttacacccgttgttgtatgaggggggcaaatatactgatttgaaggaggcggtggaaaaagcggtaggtagaatcagccaaatcattttatagtcacgattggccgttattctcccccgtatagccaggtgagcgtcaaccccggatcttcccaactccctctgctaaagtagacatgtcgacctccaagttgccctgcataccttcacttcgaaagcagcagctccacctggaattgtgagcctatgtaccccgcgaataccattttatgtattgacacccctacagcgcgagcctgagacgtgcagcaccgccaggggtttacatgagccttgcgcctggggacccgacactttggaatggagtgatatttgttcgctcaggtgaattcaaatttactattccctccgccatgcgtcgattaactcctgtttgtaggtccctatgcttcggccgtcctccgattccagctccgcttcccagacacctatcccgaccttcctcctctagtcaccttcgcgacggacttgttccacccattgattgtgcctcttactacatatacctatagcactggctcggcaagtgacaatcccgtcagtgcgacggacgatgaacgattaccgcccggcggattcagtctgcgccatggattcccccactggtttggtagggcaaaacggaacacatcacggaatgtaagcggtgctagtgcaagtgctgcatcgatcggacgcgcaagctctaccgatccggttacagacgatggtgatgaatcgaacgcgtcaaaccctccagcggcatcagcggctagtgaggacggcgatgtagaagcatcgcgggtggcagaagtacctgctatagatcagttttcggaacgaagagacgttgtccctgtgtccgagatactggattacattcggtcgacctttgatgacgaattggttttggattcgctgccggttgaggttgccgggaaccccggggcatggcatgcatggcaggcacatcgtcgaggaggccctcgaggacaactgaaacgtggaagcccgcaggctcggcttccgggggattggcactgggatggaatttgggccaggcgggtgaaagatgagattgaaaactctcattctgagccgatgctgtttggaggtgctgctcgtgggggtgtggatgaaatggtacatgacccttggcgtcctttcttgacttgtactaaccacattttagattcgattctcgcggctggatgatacaaccatgaactcagtcaaggagaaaatggctgcaatggcaggggacgggatataagtgctattatgatacccaaaatgctactttacgttgtcttaaatcttcatcgacttaatctcggaatatcccacggatcctccgtccaggagccatggaaatgccatcgtcgttgccatctgaatcgtcggtcctcaggaagcggcaggagcatatggcttcaacgttgtttacttccccatttctcctcctcgcatcattatatcccagcaaaatgacctataagctatcatatgatatcaaaagctcagctttaattattgcattgatccttgttcctatcgctgttctcgtctttgttgttgtcgtcgctcttgcgtgttccaattactggagcattcattccctcaaagaatcgttcctgtcgtgcttcagtatttggaagcagcagagacgcaagaagatcccatcggactcagagacttgccccatcacgccccggtcgactctagttcgtgcgacagacgcttcggatattcggattgaattcgagcgtcctgtcaccaacagagagcatatttaaatctcgcgacaccatggaggaaataccaactacgccgatttctgttcttaaacgccgcaccccattcattgcacacatacatagagccagctcgacatctagctctgcttcgagcttgtcatatccacagatcccttctcgccattcgtccctttctgcgagcgtggaatacgattcaagcgagcttgcaacatcaaccagaagcccgtctctcagtgatagtctttacaatattgatgtggttaaacttcgtcaggaacatgctgcagcttcccgaggtatccgcaaggctggctttgatgcgaatgaagacccatttatcgatcaggtaatttccgccatggtttcaagtgcattgtccttactgacctttcccttcagacatcgcgccgccgggttgatcctcgaagaggactcatgactcagagtggatatcaactggcgccacaacttcttgtccgctggagctccgggtcttatggttctatggagccatgtctctcgtcgaagtcagcctccgtttccggcgcaatggaaccgccaacagattccatctcgaaacataaatccagaatggacagttcccggtctttatcaaacatgctgcgcccagggtcatccgggttactttgtccgttggagcttcctgtcgcgttcgccaccatgaggtcctacacaggctggccgtgcatgggcacagattcgatgtctgtgtgggcgtcagtaaatgtatctgctgatgttgagcctatttcgctgcctgagacctcgaccctagcaccccttgacattatcatactttttgatagcttgtgagttgatccgttggtttaatcgtcaagagaaaacatgttttgctgactatcaaataggcgacaatcttctgttagccttttgacgccaatggtcttggcatcttctgtgcttgcttcaaatctggtcagcaatgacagaatagccgtagcatgtgttgacggaagttctaaagacggttttaagctattccttccgctggggttccacccattcgagacattgagagctgccctgaatgaattttctctccgccagttgaagaagaaaacgagaaaagcccctgacgcgagtaactctattcgacaggcatctcgactcttttacccgtctcccagagcagcgttttgtcatctggtattcatatccgcgtttcccccagaaaatctgtttatatctggcgtggacacggctattggtatccatacgatctcccctcagccttgcttccctcttggcacagcaaaccatccacttggatggcacattttctatgatgccaatgcagatgatccacgatcctgcgaagttcatttcatgcgaatggtctccaaagtcattcggcagcttcgtaccggtctcagccccgggatcctatccaacttgaaattgtttgttgagcagggccacggatgccagtttgattcggcaatggaagactgccacctggcgcggttacgaccaggggagacgtggatactcaaagtgaaaattggtgttccgattgagttttatcaggaaacacaattgactgaacatcccgtgttcgaagacttgatcaggcagatcaacagtgttctaaaagcgtattcttctgagccggccgcccagcatgttctaagcgcccacctggagcaccagcactctttgctaccgaaaccccatgctatttgcttggaaactcattgcactatctcgcgcatcccaggtgtgccgccccgtccttctgacgattatcgcaaggtttcagcgctaatgtcgtatgaaatggacgatgatgctatcagtatcagcttgggatcttcaagcgaactcagttgagatcaactgtttgtatttgctcgatggagtcatcacactattcttatggcctaatgcttgatttgctcccgacttgaattatgctttatatttgtatctgtataagaaggctttctcttactcttggagtataagtttcaattggatgcaactcgctatttgactaatgaagaagaactattccttgtgttcaaattcagtactggaactgggtatagtgtagatatgaccacacaaacgtcgcaagtcttcccaatgacggcaaagttcgacagcaggggatatcaaatgcgagggtagacattgcccgccatccgccatgtctctttgattaaatccgcacatttctctccgatgccgtaagccggcatctgggtatgtcctccatgcaatgtaggcatgacactgcaatcagcaactcgcagccccgacacacccctcacctgcaacttctcattgagaacagccatcggatcaccattcttccccatggcacaagtacccgccgcatggtagcctgtcaacaaaagtcagtaaccacaagacgaaccgtccttccaatacagcactcacaagtagtcgcatgctgcttcacatacggaacccactcctccctcgacttataagtatggtgcttcaaattcggcggccaagaccccttaacgatatccttggttccagcaccctgcataacaacctcattcgcaaaccgacaagcctcactaagaaccaacacatcaagcggatcagcgagatagttacaatcgacaatcgggttaaccgacgcatccgccgattcgagcaccaccgagccacgagacttcggcgcgaacagctcggcaatgatggaaaacgcgtgctggttattgatcgggaattggtcgtattgcttgggaccgccgtagcactctgtgctgaagaactcgatgtttggctgctgtggtgtgagacccatagggtcacggccgggttcgcgggaggtgtttttccagagaggctcgtcttgcagtcggtcgtcgaggcgcgcgaaggcgaagctgccgaaggggaaggtggataggaagccggttttgttctctttccactgtgcgtaggttcggtcgaagttgttgccgtggtagacgtggtggtcgtttgttaggccttgcttttcagtttcgtagaacatgaatacgatctagaggtgtggactgttaggatggttcatgttgatatgatcgttagggaatactgacgagatggtccatcaggttcttgcccacgcctggtaggttgaccaaagaaggaatgttgtgctgttctagctctgccttggggccgatgccagatcgaaggaggattgcgggactgcagtaggcgcctgcagagattatgatctcctttcgagcgtagtagatgcgagagccgccatctgaagtttgcgtgactacgcccgaagcgcgagtctcgtttctctgcttactgaagatgattttgtcgacagtggtgtcggtcttgatggtgatattcccacggtggctcttgttggtaacgaaatcagcacccgttgtccgcgtaccctggtatactgtgcgaggtacatggccacatccttgtgcaacatcgccggtgctgaacatgtcatgatgaagaggcatgccttgcgagacataagactccatcaaaagcttggagattggcgccagatcatgcggctctgtgtgaaggggaccggagtgtccgtgactctctttgtcggcctggaaccatggctttgggtgaaatgtctctgactattcgtatttttgttgtcagtgcctgcttattcaatgcggcgtgggaatcatatcacctacttttttcatatactcgaaaaactcttccccactccacccatctagtccccagtcatcataatccagcttgttgccacgaatgcaaagcgtgccattgcacccgctggatcctcctaggaaccggccacgactcagcttcacttggcgattgtcaacccctgccataggaggagtgacgatattccagtctgtctcggcatcgaagttgtttgaccacctaatctgtcagtgatgaggaatgcatcaaggagggctttgcgactcacccgccggtcatgtgaacattctccaggtccttgttatgctgcccagcctccagaagcaacacactgacctcggggttttcagctagacggccagcaaccacacagccagaggttcctcctctaacttatggtaagcaagattgtaagcttctgtgggtggataactatcttacccgcagacaacatagtcataggtatcctcaattccagaagccatggtgtagatttcagatcacgacttcatcaagatggcaaattaaagatcaccaaaatgcatgaaatatgagctcggctttttacaccggacttctgaaataggggaggacggaggcgattccgcatactcgtgggtaacttgggacaatcttacctgtttatgtactaggcagcgacattgggcttggcagaagtacatttaatgcatgatctagtgatagacttgcatcagccggcatatgattggtccaaatcaaaaacctcgggataccccaaagtgtggagtttgcggaatgtccagtccactttccgctcgcggggtatggggtatgggtgaaaagcgggatggttccacatcaaaggttatagaacagtcgattcgcacaccaaaaaagagcccacagggccgttattgtttctatacagcagtctcataacctattgagatgctgagaaattcgataaagcaggggcgtggtccaggatggctttctttccccaaaccggatccccatcatcgtcaaactcagcccactgaaagaacgaacacccttcctttcctggtgcaaaaccagcatagcacatccacatatatctgcctcgtgtctcatgcttgcgttgtgcacaccggagaatcgtatgttcaccacacttacaacgtggagtgtagcgtgggtgtagagtatcacgataccaacgataggtgatattgatacgtctgttaccggatatcggatgtggggagatagcttgagccggggtaatggagtgtttccactcctcttgcatctctgcgtgcataataaggagagaattgtgcggaagatagatcgagatttggccttgggcgtcagcccgtgcagctgatgcagtctggtttcgcgcaaattttgggactggactagtcttatccgcatcttgatcttcttccgcagtctcgtcgtctcgggctactattcggcggactcggaattcgcgtgccacgcccaagctcaagcttcctatcactgggtggggcccaagataggtcagttcgtcagagtgatatcccacgctttcggtcggcccgtcgtagcaattaacgaatgctgcgttgggccgccactcctttggtgactggtactgtaacttctttccgcctggatagatgtctcgaattcgtttgttgatctcgctgttgacattgttctgtacttggcgtgacactaaccgtagctgaggtgttacctggcgcacatttgaccgatatgtgccaccgtatgtgtattctgacgtctgttgccggtgttcttcgggcgtagagacgtacacggcgtgtgtgtggggactctggacggtgcggttgaagagttgaaagtcgtaccgagaaaagtgtttagattcatcaagtaattcaagtagaagtgtatttgcttctttagctggtaggaagttgtggatgatagtacaaggtgtgtaggtggcaatatcctcaggcgagtagaggtgtaacgttttgcccttttgtgggaggggaatgattttcttactcgcacattcattcaaaggtttcatgcttccgtcttcagcttttgtaagaatatgcgatgagagagatgtctgcattccgaatgatgaggtaacagcagctcgctttttgctgacaagtgtgcctgccgtggagcctttctcggagagaagtccagcagcattctccacagacccttcgcaggataccagtatttccaatagctcatcttgtttgatagtcgggaagagagagagcagtattgctagcttggtatcagtggtgtcttcgtggggatctgatgactcgggcttggcctcctcgctcggatttaagagccgcggtcgcttcctggatatgaaagcatccatggatgttcccagtctcatccttttgaggctctgaaaagtaacgaatgggcctcggggtgcttatgacaaatcacgataaaatgcttatcggcacatgatttccaccgaagtgaccaatcagatcacgcacagtatgaggctctccgtagataggtgcaaattgtagatgatctctatagaacgacttttaaactaggtagaatttctgaaattggcgatattggtctgctatgcatggctcagcatgtctactttcatttcgtccaatttgggtgacccatcatgaggttccttcctactatatcgcaagaacagccgcacttgcctttgtgtggtcttaccttggtagatgggatggtacggccaccagcatcggtctcgaactacacattatatacgatatatgcgaaaaaaaatggttgaaactgattgaaagatacactctaatacagactaaatccatttgccctctcccaaatatacctgtccctcccgatgatactcaaccaggggtttcatctgacgaagcccatcaaagatttctaccaatgcatcgagtgccactatcgtccacccatgataatccccctggttttctgtaacgtaactagatacacgttctatatcgtggctcgtgagcgggtgatcatcaatcctcgaatccggaaaattctcctcaacaaccttcacccagcatccacccacatctgcatccctctcggccttcgacgaacgatctaaagcgcatttcaagtgcgagaagactgcatcatcgagcatcaagcatatgcgcagtctgcttgggagctctatttcaggcatcgcgagtgacaccttgaaatcatgaaacacttgtcgaatctcttcctcattcaaatcggcgaacatatctcgcgagttgaaaatcttggaagaatatgtctctgtgagaatttggatttcttcatcggatcctgtcaacgtccggcgcaatgcccggctcacggaatggttgaggtagcgcatgaatacagggaggaggcgcttggattcgggggagtaagaggtgcggtagacgatgggtccccatgagagagtgataaagtcacgctctgggcctgggggcagggatctcaggcctggcaatgcaccgagtcggtagacttcttctttgaggaatagactggccggggatgtatactgcttcggtactggcgtttgcttgtcgcctcccaatttgggtgccatttggctatcgtggattcttgggcttatcatggcagttggattgtatattaagaagagtttatgttcaatcagaatcaagccgagcagactaaaaagcagatcttgaaagaggccaattgtggcgtcatttccatactttgcagattgaggcaaaatattatcgggtggctcaatttgtacctattgaacatgattggcttaaatccgtaccagcgaatagataattgatctagaatggttccttttactgttgcaattggggcttgatgtagctgtagatgtagcccgttgacgtcaacgaccacgaacatcacatactccaccctcaaccatcgacccagcagataagacgagagcgacacaagtgacaacatcaaccatccaggacaatcagctagcaagtatggagatgacacaggtcgcagtagatattattatctcctaatgcaacaacatcctgtaaactttttcattctgtgagtggtgactggtctagcttctcctctgggattctagttcacatgaaggcccctagttaactaaactttctctctgtctggaagataaggctactactaggataccggctttcccaactgcaatactcatataggcagagcagatatctctgtctaagcatccacctttctctatcattatagcttccaaaacatgcactagatgcggtcactcgcgtcctttagagctatttcgctcgcgcgctagcaatcaagaggccgatcagtatcaatcttatcgagatgccaaaaagaaagagcgttctagacctactattgcatcgtcccccccttacactatcacctctggctataaatgccccagtaccagaggcatctctgtcgccagaaccctcattgaaacaatttataggatgtaagcgcaacttacctctagaccagttccagtctacgtttctctcgacagagaccaaacaatgccagagatgccgtgattactacgtggaggcagcaaagcacttactttggatgaaacgactgctcaattcaattgaatttgacgcacaacacgatctaatattgtcatgtgacaataagcagaccattgatctgatgaccaagccaagttcatcatatcagacgaaattacgccacgtggacatcaataaacactagctgcgtgagaaggtaagaaagattcaggacttcaaggtgcttttgggacggaaggtgttttgttaatccgtcggcgatcatatgctgcctcagaaagtgcaactaactctgcttcgaagattaaaaagaatcccgacattcgctgatgtctgacattcgctgagctctcggaactcggattaatacatgttcctctgtgccaagaggcgctaaaaattggcggtcccatctgggcgagattcctagtatgcttcatgtttgcttgctcgtttgcttactcgcttactgttcgcattgtttactttacatggattgtttgctagatagctaagcgagaaagttcaagtttgtaacgtttgcaaagtggtcagctatatcaacttgcttcttctttctttctccatcttggttattgggttgaatatactctttcttcttggtcgatctggcaccttgtatcctgaaggagttcatagaaagaaattacatatgacgccattattgtccgcatcgacagcgtcaaagcccgttctaagtatacgtaataaagtaaattcaggatcatcacgttcaatacctggaatgggcaacagatactaaaatttcctatatcatctaaagcagattctccattgagaaaggcttcaaacaagaatacaaagacgaagacgaaagaatcatcaacaaccaattcattgagattatttttagtatgaaattgctgacatagataataaatcaaaagcgaatgtgcaagtggcgtgcctgaagagccaagaaaggacctcggcccatttgatccccgcaatcccgagatcatacgccaatctcaactcgacatcttcacgagctttgacgtttgtctttttgataccctatagcttgcttgacgatctccttttttctctttctatttctctttcctacctccctccttgggcgaccggcgccaatcagttgctcgtcatgctccattaccgcacacaaggatataacggttgcgccgtcaaatactccccattctttgacaatcgactagccgttgcaagctcctcaaattttggcctagttggcaatggccgccttcatattctagagttgactgcgaatggaatccaaccgctaaaatggtaagtgggatattccagaccccgcggcggagtgtgctacacagaaacctaaccatctggcgctatacaacctctaggtttacgacacaagactccctatatgatctcgcatggtccgaacttcacgagaaccaagtcctcgccgcatccggcgacggcagcatcaaactattcgactgcacagcgaacgacttcccaatctcaaattggaaagagcacgcgcgggaagtattcagcgtcagctggaaccccgtcgcaaaagaccgcttctgctcaagtagctgggacggcacggtccgcatctggtcgccgcatcgcccacagtccctcctcaccctcccaacccacagctgcacctactccgcatcattctgtccgcacagtccagacatcctctcgtgcgtgacatcagactcatacgtgcgcgtgttcgatctccgcacaccggcctccgcttccaaccacctcgtcacccagatccccatccacggcggaccccccgctcctgcaatccccggccagccaggcggccctaccccgcccgccgaggccctcactcacgactggaacaaataccgccccactgtcttagctacggcgggtgttgaccgtgctatcaggacgtttgatatccgggccccgcaacaagggccgcttgccattatgctcgggcatgaatatgctgtgcgaaaagtggcttggtcgccgcatctttctaatgttcttttgagtgctagctacgatatgacttgtcgagtgtggagtgaccggtcggacacgggcccgggcggggatatggatatgatgcgcgctggcccagtgatgggtgcggaactagggcgcatgggtagacataccgagtttgtgacgggtgtggactggtgtctctttggaagtgagggctggtgtgctagtgttggctgggatgagaatctatatgtgtgggatgtgcgagccacgatgtcatagaatttgacaaatcaaccaattatatatctctggcagggtccgaggcttatcatttttttccaatcgaaacggagctatgctatgtaggattttactggacacgtgtgtttaagatatcagattgccagacagcctgctttaaacggagtgcataacttgaaagggatattgatcattttatttcgtattatatgccagagaggctaaagatgcaatgcgtggtgcgatataagaacaaatgcgtcactattgcctattcctcaggcttaagcattaagccttttgttctgaaccctgcagtgactcaatgactccgaatcaagataagaggctcacaatcttgagagaaacatccatgttgggtatttgggagcatttagactcagggccatggtcagtgagccaatatatcgacaacctcccaataattcatgcgcctgaatgcttatgatcaagtgacagacccatctatttgccgcccagtctgccctcgaccttcttgcgctcgctatcccgaagggcagcaacctcttccttggtagcattgacagccgcgtgcacctggttgaatgggttctcctcgctcttctcgaattccttccggcagagatccatacgctggttccggcgcagaccggggttttcctgctcaatctctggcaaacgcctctcctcaaatgcggcatatgcggccttgaatcggcgctccgggtgtcggtcgatcttggatgtgtccttcgaggctagagacagggcatctaatgcgttatcgataccagtggcgctgagagcagattctttcttgctgcctgcaggagcatcatccaactgtgaaagatcgaggccgcgagtcttcttttgtgcggtcttggcgtttgcgcctttggctttggctggttgggaggcttcttcttcggcgagtagggcatcgcgctctgccttcttgcgggcagcctcagctttcttagcctcaacatcctctctgtagattgaaaatgatcagctcggtactcgaggacatgttctccttgagagattgagttcacatacttcttagcactgctcttggatccctttgtccattgcttttcctcctctgaagccttcttctggtcctccgctgccttttttgctgctgcggcttccgctttctgtacggcactatcagcttctatccaaacgatcttatgcttgaggggtgtggcaataatagcgggggcggggttcagaaaaaacatacacgagcgtttccggcgaccttcttggtgttctcgcctgctgctttcttgcctgccatagtgaaatattaggtccaaactatacgccggacagatcgagcaatggatatgaaaagaaaacggtggaatcgagcttcgactataacttacatgatctgatctgcggaaccaatatgccgattccgatgaaggcggtgactagtccgtgcgtcaatgttggtgccttatgaatgtggcaactgtcgaagtttccccgacatttgtaatctcctatctcacctaggcagcttgaagctgtctgtcttcttccggccatttgtgctatggccctgatatggttcttatgattgataattgtggcctttgacttgatttatactttgtcgctgttgatttcatttaccgattaagcagcgtcctcctccctactagtatgacctgatcgtccgtcacaatggctttgctcttccgctttctacaggcgttcgccttgctgctccttgccagcgcagttgtcgctgaacacacctctaattgggcggtacttgtatctacctctcgcttctggttcaactaccgccacctcgccaatgtcctatcactataccgaaccgtcaaacggctcggaattcccgattcacagatcatcctcatgctccccgatgacatggcttgcaatccccgaaacgctttccccggcaccgtttacagtaacgcagaccgcgccgtcgacctatacggtgacaatatcgaagtggactacagggggtacgaagtgaccgtggagaacttcatccgactcttgaccgaccgcctcgacgaagatgtgccgcgcagcaaacgcctgggatctgacgccggcagcaatgtgttagtatacatgaccggacatggaggcgaccagttcctaaagttccaggacgccgaagagataggcgcgtgggatcttgcagacgcgtttggacagatgtgggagaagaagcgctatcatgagctgctgttcatgatcgacacttgccaggccaatacgatgtacacccatttttactcgcctaacatcgtggcgacaggctccagcgagatcgaccaatcttcctattcccaccatgcggacaacgacgtcggcgtcgctgtcattgatcgctggacatactatgttctcgaattcctcgagacacaagtgacaagtgtcacttctaaactcaacctgggagatctgttcgattcctatgatgagtcgaagatccactctcagccaggtgtccggtgggatttgttccctggaggcgagcaagaaggccgtctgcggactgtggttgacttcttcggcaatgtgcagaatgtggaagtcgagaatgcaaacgccacagagcctggctccctcaaggaagatttggctgagattgcgcgacttgtggagaagtggcaaaatcgtgacgaggaatattcagccatgctagctgattccgctacaaatgtcactgaagacctgcattcatcgtctctacatctgaagctgaagagcactgttgggccaaccaaaatggcggaagacagcagctggggcaagcggctagttggcatctctgtcgtcggtgcatgcaccgctatctgggtggctggatcgtttctcggccgctcgtctgtttaatattatgcaaaaaagcatctggttttctttcctttggctgcaatcttgagttttcttcccggactcacggattcatggttataatgtcttcgttggaatagttttggggaatatagcatattcatggcgaaaggcgttacctccgcgattattgaatttgaagatatcctctgatgagaaacaaccatgcctttcagacacttaaccaaagtaataatcctagtaaagatgcaaccaatatatcgcaaagttttcgatacatgtcactccgggcagtgatgttgttcgaatctgattacacggcttcattccttggtcattttgagaatataaagtgtacaaggagttgacgaacccacacccggccaatatgaaaatttccagacttgggtttccgaatgtattctcacatcacttgctctaacgtacgatgactcactctccatagagcagagcaatttgaaaataattgcggagcgaagcgaagcaattacaaatcagaaggtcgtacgtacgtgtcacgtggccaagttttctcctagggggagaaataatagcgttttaatgcagcgtcaggtgaccaggtaaggtcacgtggccaagtttctcctaggggagctgaattatgacttatgacaaaagcaggggagttgatctagccgaggggttgctgtgaagccggtgggctttgcgcagcattagaagttagaattagccgctttgctctgcaacgactatctcgtaggccggtgagatcactcgtaatatcagaattattagaggagcgacggactggcacgtcatacttaaccagctctttccacaacacaacactcaacccaactcatctgtcacaacactcaacccaactcatctgtcagtacacgcaatcatcatgaatccacggcgtgagggtcaaagcagcgatgaatcggcgacatcggaagccctgtccatcgcgcagaacgccagaatttctcaacagttcttagcaacaaacctcggactcctgacggattcggcaattctccaacgaactcttagcttgaattctgtcatttcgacgacctcttccttcagcatccgttttcagaatgcacgttctcgccccgacttacaaaccctcaaccaaatcggagctggcttgcagggagctgtatttgagcaggtcggcaagcctctagtactaaagaaggaatttcctggaaacgaagacctgccatcgaacctcgatcatgagtataggatccactgtactgtttcggctacattcgagtattaccattccctcaacagcgaagtccacgttccaaaaccttacaactttatcttcaaagaagagaataatgctttctgggatgagatcttaccaaaaatccctcaggcctatcgtatacgtggagaccttatgatgatggaacggattcttccgttaccgaaagtcgtgcgaagggccttaatctcccagttttatactcctcaatacctcaataatactgggattgaggctatcctcaatcaccctggaaataagcactgccttgcccgtgtctatcttggtaaggcaaatggtaccattgatcaggagactccgctacgaaatttccctctgtaccttgagccgatggagcagattggcatcgagactctcccgcttgcaaatgcgatggggaaagcctatgcaaccctacattgggccgccgccatcaacggtgatgatgtggagtttgttcttggaacgtcagccatagctcccgagggaagataccatgaacccgactttcagcaccgcgccgttcagttatatctcttggatttcggacaatgtgagacggtagacctcacccaggaccccgatattgtctatcaagctttcaagggagctatggtgacaggggacaatcagcgtttcatcccgcattacttgaagagcccggaactgttcgcaatattccgaaaaggatacactgaagcgggcaatagaattctattagataagcggttggaagacaagttcaacatggaggacttcatgcagcagtatgaggagtatgctgaggacttcctgtactagcttcgttgcaatgactggggagctgatagctaaacttgctttaccagaatgaggagaatatctttatcaaaaatacatttaaggatgtgaggtgccagattgatcttgaagaagaaagagtacattcaactaaataacgaagatgaagacgcaagttgcaaggtgcgaagcagcctgttgatatagccatagtcgtcgttgcttaagctagtgaaattcttacacattaactacgtagctagttggcttaataaattgctgtttattgaacgtattgcggagcggtatcccaggctgagctgggaacacaggaattaagcacatctcgcatgatcacatagttcacattaattcgcaggcatttgggagcctgaaatgactcagtcgatctccttccagcctatggcaatggcgtgtgcaagaagtcatcatcgctgtcgtcttccacgggcacatcctccaccggcttgaactggatcattatgtccaacatgatcgcctttcggtcgctgccgatgaccggcacccagttacactctcttatcgaatcgcttcccggagcgtgcatcatcggaaggatctggccggttttcatgtcttcgaagtcgaaggacatcagacactgtgtgtaacggtaatgatgtacttgtctcacaaaggggcctgagacaattctcatatggtcatcaagcctgtacttgcggaggcagcaggaacgaaccccagtcgatacctgcaagcaggtcttccacgtatcataatcgacaaagtccacaatcctgtcgtacagctccagcgggagaatgcctgctaatttggatgctgcgcggcggctcgaggcaacttcgaagaagttgacaagtgccgcgagcccagggaaatggcgttgtagtcttcggattgtccccttgcagtctgagttcaccgtgcgtttaccatcccgattctgagcctccattccaggcttcagctctggtcgctggcgcggatgtgtgctcgcgcaagcatctacacgcagaggcgagagcttgacagctttgctggctttggcgaatggccccgcctcaccatcaaaggagacttctgcaaatgccacttcaaagagggataagatgacaatctggaagttggtgtgtccgcgctcgacaccccaggcaacggcctttgagatggaatcaccgtcaaccaccagtgcaagactgacaagcacgtcctccacccagtagatcgtctccatgggcgatgcccctggaggctcgcctggtcgatgagctggggagccgaactccagtaacggagcgctatcgccaacccactcttcgtcaacccatccaggtaatctgtgtaagtggctcgacttgcaggtccatctctggcatgttcgagggttacactcctgaacggggaaagaatggaatttggtctggccagacgcaattgacacgagagcaaaagtcaactcgcgaaaagcgaaggagctcgggctccactcctttccaaacgtaataatctgcgtctcgtattgactgatagtatcggctagaacttgtgtgacaaacgccttcggtgcctccgcgatgtcggtcctcggggatacaatgcggaagtcatatttgatgtcccatgttggctcgggatactctaaagccggtgaggccatgtgctcttcgggacagatttcaggcgagatggtggactcgtaccgatagatgctgcctacaatggcacgaagccataggtcgtcctgacgcgggacattccccagcttccaatgtatggtgtggttcatagtgaggacttcatgatcgaggttgatgatgtagatgtactcggcccagttattcagctctgggaagtcggaaggaagcgactcaaactcctcaaactgcgaatagtcgggtttgacgccgtcacggatctcatagacatctctatcgagaacactttccttggccgcatactgggctcgcatcgactcaagccatcctgcaggcattagtatagtgtaaagcaagatctttattcgcgccgtactgttgtatttctcagggtccgttgggatgctcgcgactatcttagcgccgagaccctcaaagtaactgtcgaaacgatgccagcgaatgtagtaacgcccgcgaaagcgtactatctcaagacctcgtgtgcccattgctgtagctggaaatttgattcttagctctcgttgacagaaacaaaaagagctatagttaccaagtgggtggagacggtgggataatcactgtgggtcacgacgggaagaccctcagggcttgacccacggggttgacaggatcatcaaacaagacaaacacaagcatgtgactgggtttagcgaggttggttcattgattgatctttacaagcttcaatgttggaactctagttccaagtacatatgcattaagtagtctcaagcgcttgatgggtgtatcagaggaagcaggtctccatcatttcatcttccgcataactatcaacatcagatggtctgtaccttcttcaatgtctcctttaccgtctcccgatgatggttcctgaaaagggctgtgtggtatgttatgcctggctagttctttgccatcactgaccatgtcaaagggagtcttttaggtctcattatcgtcatttgtcgcttcttttcttggtatgagagatatttccgtggtaaaagccgctgttgcatgtcaaatcgtggtcaacacatgaacaacatgatcttctgaatcatctttggctttggcttcgaagagcctcgccgataatgaccgatatctcgagcggagttaaaaagacgctccatacctgcttctgtggctgtaattgacatgatatctcgtgcaaggctcgcaggtactgagaagttactgctaaccgtcatctcgatattcaatcatacatcatgtctttaacagacacaacgttgagtggccgttcaattggcaacaatttgacaaccgccggcgaagttagaaagtccttgatcaactcaaggaatgtatatcgactacattgacaaggcagcctctggctcaatacacgccttctccgtttcgacatgctactaggagaagtgcaagcactggaacaggggtttaatatcgataattgatctgaccgccgagagatcctccgttcctagagagacggtaggaaacatgattcgaacaaaggattttcgcgtgagactcaatttaagagtatagaaaaatctagcgtaaagcacccaatttgcaaagcatcgcgcaataagatgaaccaacatattctgtgaaaatactcatattaaattcaaggagttgaggagtaagacatttaaatagtgaaatattccgataataaaagaatgggagcaaatatcgtcgaggtgatgaagaggtatggaatcccggcacgtgcctccgacgcgtcgcgcttgtccacttccccggcgctatgagagactctttgctgcaagggcttcaccccaaataaccacctcacatttctgggcttattcttacgagttctctttcttcatgagctgtcgcatgagcatatgataatcccaagctggccatgtatctcccacggcagctcatctcacacctctacctacaactcctccgatctcaccacccgctttctccacccgtcctgattctcgtggcattagagccagacgcgctatgtgcctgtcgaattctcacttctttgttgaaacgcgactatatcccccataaaatccaaccagttgcaggatatggcgaccttgcgcgtgcgggggaggagatggtccgcccaatgcagactaccaatgggggcagcggaggagttgtggtatgcctcggggtagggggactggtagatctggccgagatacttgcgttgagcaatcctgaggacgaggtggaagatatgggaggcgtggaaatctgggtattcgacgcgcgacggccgtggaacctgggaaacgtgtttggtggacaaacggggataggccagcacatgactgaaattgatgtcaattcgcgactgcgaggacgcggggttgacaaagggtgcataacttccgcttacacgtcgaagaatggtggcattatcgtgtatgacgacggagacatcgaggaagagcttcgcaacgaacgagaggcatactacgcgttactagaaatgccagaggttgacgaagacgacgatgatgcgagtgacgacggatctgaagacgaaacgcaaacagggtcaaaaaagcgcaaatcctggtcaggtcgcgaagacgatgaagattcagaaggcgatgagccgcctcaccaacggaggagaagcaattcagtaggttttaacatttttatgatccgacaatggactaatgcgtgatatagggctcctttattgactcgtctcccactcgccgcaaaaagactggaatcaattcttcgaactcgtcacgatctgtgacaccgacaactgactcgccatcaccagctgaggcaaaacaaccctcggcgcggtcattaaagaaacgtctaattaatctcaagcgaagacacgactccgttctacaagcctactattcgtctggaacttcatactccgaaccgatttcatccctgatctactctctggcatctgagcttggacgagatgacaatgacctgttgtggcttgctattgtcggtgtctccagtctagaactcagcggtcggacaatgaccggagtgggtatttcaaacacatcagaatcaggaggctcagcaggctggggtggccaacgtggtgaacacatccgtcaaatacttcgcgatgaggtgcaccgtttgaacccgcctgatcctttagaattcaaccgtgacattcgaggagagatcaacggtgtcattccaacaaccgctagatcacccaccgatacgtcgattcgtctttctcctgaaccccgattccttcttgtcaggcactggtcactatacgagagtatgctgcacagtccctatcttgcgccaaggctgcatgtatggactgagaatggccgcaaacgactgcacaaacttctggccaagatgggaattagtctgacccagtgtcaccaatactatacccacatggacatggaattgaagcgtgtactacgatcacggctgctcaagtacgcccctatgtatggcttagacggactcgtaccatcagcgggatctaccagtgcgagtgcccgtgagggctggggatttgtgcgttgctggggctggaaggcttgcctctctgccacagacgtaggtgttattgtgggtgcgatgctggaagttgggccacatgagactttggcttcctgggacgccaaacgtctgccacgagtgcgtgatgatgcagagaacagtggaatcacaggcgcatctgacttggccagtctgctgcctcggttctggagtgcctatgatgcgctttcactaacatccgaatcacccacgattcttctagagtctctgcccctcgcccaacacctacaccgtgctatccttcgcaccggtacctccctgctctctaaacatcaaatccgtcaccttcgagcattccgcattgctgtggttaaggatggacccgacgtcaaactcttcaccaaccctggggccttgacgaaattggccctgtggatcgccgaggccattcgagtccaagaaaaagagcggggggactcaatcaagatcggtcgcaagagggcagcgggaactcctctcgtccttgctggtctcgacgaagatcgcgatctctatgtcgtcgttggtactggtggcggcggcggcgttgttgacttcgctgccatgtccaagcgccaagaggaacgcaagaagaagaaggaagataaggagaagaaacagaaagagcgatcagagcgccggtccaagcgagcaacagagcgtgccgagcgagaagacgagactggtgccgaagactcagattcagaggaatctgagtcttcatcggaatcggagtccgaggacgaggaagatccgcgtggaaagaagcatcttctccgcaaccggtttggcattgccttccaggaggtagtccaggagacgaacgcccgtgtgcgaatcgacagcttcgagcattgtgttgtcgaggtccagaaggatgaccttggcggcttcctcgaagcattgagtttccgcagtgtggtaggctaaataccctctacgatcaatcacgcagtctacgacctgtcatctttgtttactttcttcgatgcatggggtgggagggatatatgggaggggatactggactttgaaaccggctacatgcataatgaccgttgcatgggtttccacgcttgcgagcattcaaacgcccttcattcttgcatctgtttccaatggcgtttatggtgtttcttgttccgtgaggaaaacatgtctgattctatctagtccatagttgcatcgaatctatgtattttcgaccttccgagagctgattattggatgcttctcatatagaataatcgagttattgcaatacttggaataatacatacaatttgctggtgtcaggttcgtaataatagcgtatcatctgacaccgttcgcaaagtaggagcacatcaatctcattccgagacatcacatcatcgtggttctttcacagagctgttcttttacccccaccagaagttcacgctaatcccagccctcagcccacgcacatagtgccaccacccaacaggaatgtagagacactcgccttccttaagaacagtctccacataatcggcgtccatgaacccaggccacatctcctcccatttctcatattcaacaggggaagtctcgatagccgccaggtccaccttggaagtgttggacatgtcaaccgatctacgagtggttggcagagccccggatacaggatctggctctgccgtctcatcaatagacgtgacccattcttggccccgtgggtggatctgagagtcaggcgtgtgtggcgagtacagccggatgtacttggtgcccacgacctgcgcgaggatattgtggtgggggtcgtggtggagaggggagatcgtccacaccggtccgatccaggtgttgataattgggtcgctggggacacccatgagcgagcctgcatctgagttgtgttcgtctatgacatgctcccttggtgctgtgtccaactgggggccatgcgaggtttcaggaacctgtgcttgaactttagcctcacgctctcgctgtttcttctcatacactggtgttcccggatctggacctggtggagtgatatagcagtagtctggtacactgatgtcgttacgcaaggcggggatttgagtaagtagatcgtgttgtgccatgtatgctgtctccccatcgaggttagtgacctggggctggttttccggcgcctcagccggagctaattttccttgccatatgtacttgtccacaaactctttgaatggcatgatcttctgtccccagtcctcgtcggtatacgaccttcccacctcaacggggaccaatcggcgacccccaaacgtgcggtcccaccagtagttgcgcgaagaccatggacgcgtcgaaatggctggccagtgttcaattgcatcttgtatcaccagtggggtgcggttgttttgaatgtgatgttcgatggaatcgaatgagggcgccgatatacgcgggatcggatggtccagatggggttcacggatcgcatttggagggaagagaggcggcgagaattttctgcgtttcgcaattggatactccggaccatcagtttcgtcgtattcgaatttatgggattccgtagctgcctgcagcgtggacaatagggattcgaccagcttctcgcggaggggggctccagacatgatcaggacgttatccaggatcgccacgacatctgatagccatggcgtgtcgggggagagcttcggctcagttgcattctttatgtcttgaatgagttgtgagacaactaggtgctggttttcaatggagatcaggccgcattttgtgatgatgatgacgcaggccttgacgatagacgcgtccgtgtagagtcgatgccagcagatgtgcacatccttgaatggaaaggagtgcagttttgagttggcgagctcaaatgctttctcagtgtcgttgaagagaagatcttgaagttcagggttgtcgcattggagaattgggtcgtcagagctcggcttggcgataacggacaacgcgtcactgaggactgataaaagggccatgactgagggggaggtgcaggagaaagcgagaacggaaggaaagaaagaggtgagctagaaattatccccaatgtcctccctaagtgtccccaaggtatggtgttgtggtggattcgagttcctcctaccgcgttcaaaatatatcccagaccctcatttgggcagtcaaatggagaaagaaatgaataccctattttttctatgtcatttaatacattagagctaggaggttgcctagataggatgaaactaaacccaggcatatgagagcttagattgcagagggatgttgaaggtatattgattttattatatagtacattttgttcaagatcaagggagttttctaatatacacgctttattcgagaagctccatcaccagtttaggaattcgagacaccccttcgcctcttttggcactgaccggaacaacacacactttctccttccaagcgcgttcatgacccgaggggtgctcaatcgagccattctgaacaccagacaagtactcctgcagagctcggaattggtcttgtgtgttttccaggtctgccttggttgccacgacaaaccaaggcttcaaatgcagaggtgtcatcaccagcggaggcagcgagccgtcggggttggtattcaagatgggggcgggctctcggtcaagtatctgtcgccgatggccaccatcctcagtttcattgaatggattccattcaatgatgtcgtcttcctcagattcgggatctgcatcgcgcattcgctcgtactctccaagttcgcgccacagtttctggagttcctctacaggatcgccgttgctgagatcaaccacaaaggcaagaatcccagctcggtcgatgtgccgaaggaaccccagcccaagtcctcggtcgagatgggcgccttccaccagacccggaatgtccgcaatagtgaagtgtgtgcgacggaccttcgactcaacaagaggacgacccttcatgtcgtcggtgatcacagtaccaatactgggggaaagtgtcgtgaactcccagtttccaatgcgagtccgactgttggtcaacgagcgaaggagcgtactcttgccggcgtttggtttcccaaccaatccgacatctgcaaggagcttgagctcaaagtcgagttccaacatcattccaccttcacctcgacttgcgaactttggtcgtcccattacgcgtgtggagaagtgcggattgcccagcccgccaataccaccggcagccagaagcatgggtttatccataggttttgaaagatccagccaaatcggtgccttgggttccatggctgctatattctgtcgtcgcgggtatgatttcggaaattggaccataagaaaatcagacggctttgcggcggggtgtagtacccagcgatcgtgctggatagggttgaactcgtcctcttctgtttcttcaaacccttcaccttcgccttcatcttcaccttcaatttcagaatcactaggagcccgccacacctttttctcctctttagcaatataggccgcttcttctgcggccttgatgcgcgcccactccacctcgaccggatcataacggctcacctcccgcaccacggtgccgacaggcacctgaaggaggacgtcatcgcctcgttttccacccttacttttaccctgtccgtttcgtcctctgctagctctgataatgcctctgcgggccagcttgtgaagactagtcaagccctcgacagtctggatgtagataccgcctccgctgccaccgtcgccgccgttcggaggtccctcttcgacgtatttctcgcgcaggtaggcgacacagccatgtccaccagatccagcatgtattttcacccggcatttgtcttggaaaatgaaccgcgaataatcctccggagaaggatccagatgcgacaggtctggttttacctcgtcagatacggcattttggctaggctgaggtggtgtttcggggtcggccttggtgctctgaaatcggttccgtgcgacgcaaggtttttgaaggtctcgtaggaataatcggctgcaacgggcttgtcttggaaggaatggtcgtatgggaagggaaaaatagactcgtgcatgcgccatgatgtgtgattggcggctatttctcgctcattctgtgaatgcagttcttgcaacttttgaaatagttcaagtcaagattagatcttcatagggcgcagatataccggttttctgtgaattgtcaacagagtgagttatgacttcagcggatttctcaatgtcccgataagatcacatgatgataagccatttatagtctccccaatgggtgcagaatatatggccataccttaaagttactcctttttaatccaattttcccatttttgcgaatccaaaaagggctgtgtaaataacatgccgctgatcagactcgatattcagaaggatttgccaaggaaaaacgagctgttcaaaacaatgcccaactctgcatctaaccgttcgcttgccacctcatcaacccatattatgagaagccgtcgggtttccacatctgatccgtagggtcaaaacaagtacagagtactttgctgcatctgcaagttgccgctgtgactccccgatctcgtgagaaagtgaccaataaacagatgcggattttacttgaatagactagctcaattttaatcctgtctgattgcgactcgactctttgtctagctttccctaatgttgagtcgctgacatgcagcggaggagagtaaaatacgtaacggtctgttgcctttgtttggtttaatactgtactgttatttgctttttcaacctgctgagattaggaagatagcagcttatgttggcggagaaccttgggaactatcaatgcatccatagatcactagcatgaccattactcaggggctgatcatcaactttgacgttatgacgacttgacttctcctatatttcacagccggctcaaattaatacacgaaagctttcgcaacagtcacaagtgggagaacccaaggcgcagcactctagtccggacggaatcaacaaggatatagatgcttctgattatgtccttgtctcggctagctgaactctttggttttgtttttgtgttcttaccaggcgtgttttacatggattcggtgtatccttgtttttattggatgtgtttaccttgctccaactgtccggtgctccttttttttttgagagtttctttctgatagctttatacaaatcagtgcctaatattgactggaatggggattacccttatacacaattcctcgggtatattatctgctcggggaatggctttctatcaattagttttcatcgaacttgactaaacaattatatgatctaggacggctctaaaatatattttgaattgccctaagaatgtactaacacaccgatttcatgttgccttggtctatatcgacataattattacactcaagcaagcacatacccgagtctacaatgtctttattcatgcgggaaaactcatgcaattaagtgaaaagtaggcggaaggcgagatacatggacgtacgtatatcatgcgcaacgtcggtagataacagtatgtagtactcgaaaatggcaagcgacataaattaagacataggcagatcgataataacaaactatgcagcggagagagattatgagagatgatttggaatttgagatttgagattaaagccaattccaaaacgggataggatcacacctctgcagtatcaagtacccgtgtagtggatatatcatagaggctgcattctcggtgttgaaaggtccgatggccctagctctaatgtcaattttagcacaggcaggaatctgtgacccgctgtcacatttatagcgtgattatggcaactgcagaagcgggaatcgtgttcaacagtgagatcaatcaacctatgagcaagagtgaacttattgtgaagagcggtctctggcattttctaggtttcttccactcaggggcgtgaaattcgctatatggcatgatccgagagatatgaagtgaaaataaagatatgggcatcagacgaaaacttgcccacagtactgtgcataagaagattccacaatttttcgaccaatcagagtaccatcaccatactctcaggagcaagagagggaagctgacagactagagagacgccagggaaagaacccaccagaaccgagcctcaaggcgatcagatcttggctccggggcgagcaaaagtactacatggggaagtctgctgtacttttgctaagaggtttagcactaagatcatgcgtctgtacggagccgttcgtatctggactctatctagatatgatcggtggcggtaatttttaggggttcgtccaattcggtaaactttacgagtatacgaagtagtctttggtactaattgatattgtattgaatgatctttgaggaattgtcttttagtactccgtagttagttaactacttaactatatgtcacgatatatgcatggacaacttgtttttatagacctgtgacctgtgaggctatgtattgtaccaccctctaggtatcattctgctgtttgcgtgggctaattatttgtatgaaatttctctggagtaatattcagatggctgagcaatcgaagtattaaactcccagctcgtcaaggacgcgcaagcggcgactaggtttgtgtattggctacttgggaaataatgatacgcaattcaaaaggagttattgctcgaagtctagatccaataaccagattttcatttaactagtatcaggtaggacgacaagttctgctcacggtagttatcgtatgttggccaagctataaatgggttgaaggtgggatgttggataatcgacaagataccaggcaggtgatcttgagtgataccattgagcttcaattggtttccagtaagaccacacgtgactgcaatgaactcaacattctgtgcctagactcctgcaggggaatcgatctcgatcacatcgcaaagtctagagtacatgaagtaaggcgggaagtacgtaagaagtgtatagatccagctgaccaaaagtccacggaattcagctccccggtaccttgcggggcaaaaagaaatcaataaaaaacgggaagaagaacaggaatgttcgcgagtagaatcgatagtgtgaaaatccttgcgaaaatacggagtacgagatgtgattcggatccactcgcggaacttttgcactgtacccgtcaccgcggcaccggatccctgctttccgcttgccacaagtgcggatgagggcgatcgttcctgttggtcacggaaatagaaaaaaaaagagaaaaaaagagatcggatggtaatatgggtacttcttacaataccaatccattctttacattagcccctctttgggaggaacctcgggagacactaatgtactccatatatccttaacttagtagtaccgtggaactggatctgtaagttccatggtttgtctagcggggaccccgaggtggaaggcgatttggagattttattggaccgcggacatcccgctcagctgccggaccagaggattcagctttcctcgggacgcacctctggaatgaaaaaccttggaagacacgcaaggcagctgggcaatcttaatctccaaggctaggttccgatcttgcctgtcagaattcgtacgtatgcatcatgcatgggttcggatacgccttgccggttcacaaaagtacacctgtcacttatactccatgcagctcctcgacaacctttagaaattagaatttcaatcttccccaaacttccgagatctaaagctaagccataaatctagatcggaaatgcagatgtggggtttagctggtacgaccagtccaaacaattaagttgaagattcagctatccatgatatattgtagtctatagtacgttgtacgtatacactcttcaaccctaccaagtaaggtcccactagtgtctagaatcaagggtagccgacatggataccgatctctagaaagagacagctaaacaaaccgtgtaaccgatcgccgcaaggttctggatcgggagtcgaggaagtaaatcgcattgaagcaattaaactcaaaccttcttgctcggtcgatcgggtagactgcatgaagctatgagttcccgtctcaaatgcatatacgtatgtactccatactccatactccatatattgtacggagtactccgtacacatcccaaggacggcacgaccggtggcggcttattaaaatagcaaggaataggaatggagcctgttttgctcggagttaaaccggcatgtatccgaatctacgtagcgggatcacacctctgaaaacaatgggattagactgatctgcaatgtatgttgtacatcgcctacattgatatgtatacacccttgtacaacatcgggagggatatgttggaatccttgtttttgcccgtcagcatagtgtgtagccccttttccatcgaatttgccatcgaagatctagactttgaatgacggaatccggcccacgggagtgactccaaaagttgatacatcacacaactgagttttcttcctcatcgcgggacagaaagggaagccgcacccagcaattttgccggagatctccgccaaatttgggacaggtccaaaatgaagccttcctatatgccggaagaagtttccattttgccggaattatttttcttctttgattggtttgtttgtttggggtttgagggggggcaatcggcgccacgcttcagccgttcgggaatctcgcgactgtcagaacccgacaatttggtgcggcgttctgtgtggatcatggacccttctgtctagattgggattgtttagcgtctgcaaaaaatttgtcacaaccgactgatctatccgaaaacggggctgtattcttaggggcatcgtatctcgccaaatgctacggagtactccgtataggttcgtggtaatcagatccgtggggcggcgccgacaagccccggtcatcgttgctgtggcggtcctcagggcgggactgtacgatcgatctaggtgtcgtggctgtgcaatagacgaggtatagtttgatagtgtgccgtggaggttgaatccacccccttgctattggtctcgatcgggaagtgttgaggtattattccgctgtgatgcaatatcttgctcactttggaatgaaggaaatatcaagggcaacagatggaatgtggtgaagatggttcatgacctcatgtgaaattaagcacggatcgaccccgacatcgcagtacatatgtacgttcggtcgaagctgtgaccaagtactagtagggcacggcgagatctcggcaaatctactctacggcgttatcaacatcatcctggataagtcggtgtcgtcaagcatggcttccaactgtgcgtgttgacttgtaacgcttcaccgtctttttcgaggcttcttgatttcgagtcaaaacgacgcggaggtctggatatcaatatgggctacatgcgcaatgtcggtccatatcgcaatcctcgacgatcatagttggacagtttaccggcggtgcagactcaaatggcggggcagaacaatacccatgtagggctcagcctaccacgggatcacaggaacgagtacggagtatccgagggagaattcaaggcaagacgtcaaagcatctctgcagataatcaacaggatgcagccaagagacacaccgcttgacaccggttaatatcagaccttgtcaatgcagactcacttgatctatgtccccctctctttccaaattggcgagaatcggaagaataaccttgcaggggttccttttcccccaccttacatggatgattcggttggctgcagggtaggaaaatcaaagactcacatgatctccatcccgatttgaatcgcaatatgtatgaaacaaagagaacagcaagcactaatttccgaccgttgggtcgcaattcttcttccgaacagtccgaatggatttcgaggtagacacgactgtcgctgacggagctacggcaggcacagtcgcgtgatgcatggcatggaaagatgacgggctttgtttcctgaatagcagtcaccgctatatccgcgttgaaataggtcgggctctgttagggttgggttgcgactcgcggactggacatttcaacgatttagttgcaagcgctcccaccttgtagccaatgacctctctggataggaatgcatgcattgggatcgacatatctgggtatttcatgcatagacggattggtcaaacaccctgtcagacctcactaggagcttgtattagcccattgtcagctgggcacggtcacctctgctttctaatcgaatgactctttttattgagcaatatcaccggcattctgtatgactggttgttgaaaaaaagtcaagagaagtgttgcatgttgcaggagccgccccagtcgggtttacaatgtcttgctcacaccgttccttgactttcctcctttggcatctcctacaaggcgcacccctgagaggctctagccgctaatacttgagtatgacgttgtagtttatttatttttttttcctttcgagttagatgatttctcaccggctttttatccactccctcgcgtggccccagataatttctgtcgtacagcaagaatcgaactagcgcatctcgtttctcccactatattatactccatatatcaagtacatatgcacctccaacagacaacatatattcgaatacaaatggtcccacttattcccaaccccttgggtcttatgcaggcccttcttgttgggtcggcactgtaccgactttggatagatcccatttgtgtcaacagatcgaaagtcaaaaggaccggagtaatagatagccagaatgtaccagcggaattacggttcagtaatccgctccacttcgccacaatggctgatatagttataagggggagaaaggggcggcattgttttcccctgttgccgatcgacgcctaacggccaatagatggggctcgggagtgtcggtgaatttctgacaagctcagctgattctccggaggcttctcgaaggtctcagaagccgtaatccacattacagtggctacggacgagattatttctactagtacggtgtgtatattgtaattcgacgccaagatgatcatcggatctccgagggtttcaatagcttctctttctatactgcttccaactccataggctccatctgtaccgggatggcgggattcgcgagaaacgctctggggagttgaaaacggcttttactgcggacatgcaacaatgcgacaatagacggcacggcgctcgagatgggctagagtttccctttcagctggtacattcgtacaccgcattttattcctagtatatcctaaacatggttgacctacatgtatgtttcgacccaatcagctggttccgaccttattagaaaagtacgcttctcctgatcatcccggccatctgggaagagtggataacatgttaggtttccgttgagtggagagtatgacgatgtgatgtttggtctcagtttcggagtacgaagcacatttacaattatagagagggtaaaaatcctgaaattaaattatttaattaaagaaccattttcaagtctacctggcaagtccggaactagttcaagcataggttctcggggagagacaccgcggagctatagggcgagatctatcatctcactattttgacactaaaccacagctctgggtacaaccaagtcgatcttccttaccttacgccatacgggtgaagtatcgtttagcgcccctcgactaataggcctaatgccgttccccgggagcccggcgctcaggaccgtgggtctcgacatcattttggtatgtatcagtcttgctcgttggatctgggggaatggatctgtcgaatcaaaggtgtggaaactctgtttttcctttttaattcgtttatattacctccgatctgattaatcgctatcagaatcccatttttaatttcttttccctttagaattcgcccggaagaacactacctttccccccgatggccaaaatgtaaataaaataagtccaatccctaaaagaatgacgctggaccgatatcttcctattggccctaacccctttccttacctccggggggattcttccgcttccccctgctctgcttaacggaaatgtcaggtttcgacctcagatccactaaataggataaagggttttcttttttattaaacggaaatcaaatcgaaaataaaacaaaaacacattaattacaataataaagaaatctgacccacttcgttcgtctttatcctgaatgtttgccaactgcatcctgtacagctgtaaccgaaatctctagttgtgatgctgaacggttgacgttttagttctttggcgcctgatcacttctatagacctatccactgtcaggacttcttattataatagcctcccctttcccggtcttttctttccctactctcttctaactactcttgacatctttcctcctccattgggtttatagatcctctccttcagcctcctcttgtcaatcttctctataaactccccggactcccttgccgctgtctcatacgcacatcgtccctgccttattggatcttgatagaatttaccgcagggggagcaatgctgaagccctaaaccgaaaagacgctgctccttgctccaaccacactagcacattctctcccttggcgactctggggaaattaagcaaacaaaagcacctttttatctggtactttgttcctgcttttcgtcttttttttctgagctatacactcttaaagggaagtggggtgtctttgagcctctgaaatcctttggtctgcttccagctcatttcgaccttctcacctcttctctctcgacttcacaatgtttcaactaccagcctgtttacagggccgacgctctcgcaatggctcgggcgataacttctctacattcccaattcggcaactattcatcttaggtaagtttggtacttttgttctgatctatgaaaaaaaaaagatatggtagccgcaaattcgccgcaaaccatatctatacacaatgagttcaatttctgacaaaggcaacagcactcgtccggatctgtgaaccaattgctttcatgtcaattttcccatacgtgtatcacatggtcgaatcattccatgtgacggataacgaccgtcaaatcgccctgtacgccggcatgatcacctcctcattcacttttgctgaattttcggcgggcatgttctggggccgcatgagtgaccggattggtcgtaagccagtcctcatcatgggcctcgtgggcacggccatcagcatggtggtattcggatttgcgcccaacctggccacggcgatgattgcgcgagcactgggcggcatgctgaacggcaacatcggagttctccagacgacggttgcggagattgtgaccaagaaagagcatcagccacgagcttattcgattatgcctttcgtgtggtgtcttggatcgatcattggaccggctatgggcggcgctttggcccagccctgcgacaactacccggccctcttcgctcgcagtacgctgtgggataaattcccgttcctgctgcccaacctcgtctgcatcaccgtgctgatttgcggcatcgtggtcggtttcttgtttttggaggagacgcacccggagaagaagcaccgtcgtgatcccggtctcgagctcggccactggttggtcaatctgtgctggggctcgcgcgtgcagcttcccgataattccgatgtggacgtcaaggagaagtacttcgacgatgcacctcctggatacgaaaccgccgaatcatcgccttgcctgcgtcccgtcgatgacggcgcatcggctgattgtgacttggagggacagaagagccccgcgcccaaggcatttacccgacaagtcgtccttgctatcgttgcttacggcattcttgcatagtgagttggcccccttccccgctctaagccacacccttctgcccaatacgtttgaatgatttactgacctgcattgccctatttcagccacagtgtctcctttgatcagctgatgccggtcttattgagcaccccacgatccgatgacgaggtagtcctacccctcaagtttaccggaggcctgggaatggccacgaagaccattggtttcatgctcgctgtgcaaggagtgtactcgatgatcgcccaactgtggctgtttccatttgtcgtcaagcactttggtactttgcgcaccttccgcttcgttttgcttgcatggccccctctctacctggctgtaccctacctggtccttcttccggccaagttccaagtgcttgccgtctatgtctccttgatcagcaagatcacattccatgtgatcgccttcccggccaccgccatcctgttggccaatgccgccccgtcttccaaagtgctgggatctatcaacggcgttgccgcctccactgccagtctcagccgggcgtttggtcccaccatcactggtctgcttcactccaagggtcttggtagtggatactccgtgctggcctggtgggcctgcggtcttgtctgcctaatcggcgccatccaaagtttctggatggaggaatctccggaacctgagcgcttcaagactcgtcagcccgaggtcagcgaatccgagatgaagcgtgaagccatcccggacttcagcaaccaggctgaggactctgacgagctcccagaggaagagcagcggttgctttccttgcgttctagtgtcgaccatgactttgacattacggaactcaacttgaacaccgtcgataacttccccaagcctcaaggcgatctcacccacgataccaacgtttaaaactgcgaagcttgcatattttgcagcaccaccttttactttcttccatgcttctggaaggcatattcatttcagcgctaaggcgcaacgcggttttcttttttgtcacttttttcttttccccgtcatcacgatacctcactctgctatttcattctcatgactttgagaccgggaaacggcgcaattatagatggttgcattgcgtatgctgaagcataaaattttgggtctcttcttttctttcatgttatcttggagcatcaacaggttatattatgactattcatgtgcatctgggaggttattttgttattttgttcttcgatctgtgttctctcgaatatcatgtctctgtcggttagagtatcttgctacagactgctcaattaacggccgtcatcttctctatcaactttgatcattttctagccatgtagtctcatagtttcatgcctcctagcctgtttcactccttcttgcgctatattctagacaatggtttcactacaggctagcatatgttttccgacggtgtccggtcgattaagcaattactccttaatattgacaagatcatacggccagcatgttttataaatccccccctccccgctgttctccccccgctctcatccccctcatgtccaatgccttgtcgtaaacctgacagcggggagtgggggaggtccaccaaatctccctagatgaagctatatcagattcaatcttcattcttcaaacaaaggtcccgtcaaagtctcatcgaactcccatcaaagtccgataaagtccatcaagtccatcaaagtccgattggagtccgattagatctcggcatgtcagagcctgggaaacccgagatctcttcccggggtaactcaatttcccaactccgccaatacactctgactatggtttcttctcttcctcatattctcacaggtctcgtctatggtcgcgtgttgcaattatttgctcggaggataatctaattccgaggtttccgttttggggccaatctcttttccattcgatttgacacgattggcgcgattggcacgataaatctccaatcaccgaacgaaacatagacgaacactaaaggtatttcgtggtcttatcatgttgatctgctctgggggagttaaatcgcagttcccgaccattgtccccgcaaaactccaccaagagatgatcgcgactctgcggctctcgtctctcggttctcacaatgcctaaccctccctcgccgctatcaccagtctcttcaggcaagaagagaccacatccctccaatacccccccagcccaaactgaccccgcgacgaattctgcttccaatctctccgccccgacagcggtgccctccacctcgcccgcccattccatcgtccccgcctcgtctgcttcctcctcattccgcaatgtctccgcctgtaaccgttgtcgactgcgcaaaaatcgctgcgaccagcgcctcccgcgctgtcagtcatgtgagaaggccggcgtgcgctgcgtcggatacgacccaatcacaaagcgggagatcccccgcagctatgtctatttcctggaggcacgcgtagcacatctcgaaaaacaattagcggataacaacattgaaattaagaaggtcgtcgctttcgacgaggaggaggctatcaagctcgaagctgatggcgacgccgcgcaacctcgtcccggctcggacggccaggctggggaggggtctgcagcggagaaagcacagtggaggaatacatcgaaagaaaatgccggtcgactagagcggagaggagaggggggtaatcgtgacgcggacgatgatcctgcgaatgaggataattggcgcctgcataatctggtctcgaatatcggtatggtctctgtacagggtacttccgacccgcgttatctggggtcaacatcgggaatctcgtttgcccgtgtcgtcttcgctgcggtaaggagctcactacccggtaatataccggaccgtgcgattcgaacgagcgatcgattgccccagagtgctgcgggcactgctgggggtgggggtagtatgcgcgattccttcttcggactgcagacaaggccgatgatgaaatgcgcgactttccctgaccgggagctggctgaacggctggtcgatctttactttgaacacgcgaatcctcagatgccgattctccaccggggagatttcatggagctgttggataagacttacttgttagaggagaaaaagcgttctccacgcgcgctttatgtgcttaatatcgtgtttgctatcggtgctggcatcatctttgaggataagcctcaaagctcggatgatgagagtcgcagtagtcgtgaacggccctcgtctgggacgaagagaccgagactctcgagccatcagtaccagccggaggaataccatgcctcggcaatcattcatttggaatcattccttggttcgtcctctagcgagggctttggtggattggaagagctgcaggcagtgctccttctagccagctttgccctattacgacctgttgcgccgggtctctggtacatcgtcggtgtggccatgcgcttagccgtcgaccttggacttcattacgaggacggagcgggcattgactctgcaacgaaagacggcaaccaagcgcagtcacggatcgatgctcgtgaacgcggccgtcgtgaatgggtgcgcgatatccgtcgccggttgtggtggtgcgtctacagctttgatcgtctggtagctacgtgtgtgggacggccattcggcatcagcgatcaggccatcagcacagagttcccgtctatgatggacgacaaatacattaccaagtcgggtcttttaacaccgccggacggagcctcgacatataagcatgtcgcattccactacttcaaactacgtctgcttcaatccgagatccacgatgtcctccaataccaacaggcgcgcgctgtgcggaggagaggcgccggtgcagttattctcccgcacgccgagctttcctcccctttccttcagggctttgactcgttccgctcgtggcgttatgatgtgcatcgccggttggttgagtggcaagatactgccccgacacggccggaaacaggcgtgaggttctccattgagctgcttgagttgaattactggcaagctatcattttgctgtaccagcagagcttgacggttccggctgaattggtgggagagctgactcctgcggacgacgtttctagtccgtccttttctaatcctgatgaaggtgaagatgaggatcaagtctatcttaatgttgccgaggctggtcagaaggtcattcgtatctatcgccaattgcacagagtacgcttggtgaattacacctatctcgccacgcatcatattttcatggctggtatgctgttgttctttgcatttctttgcttcattactgacactcttatcaggaatctccttcttatatgccatttggcattcgcctttggttcgaagccgcttagtaggtccaacttgggatttaggtttatacttattctaactttgcctttcttagacccttgatgaagtcgactttactgttctcgcggcaacttctgttcttggcgatctgatgcacaaatgcccaccggctgaagcatgccgagatgcgttcgagcgcatgagcaaagcaaccgttcaaatgtgtttatctacaaccggattcggatcacaagtagacatcagccgtgtccacgccacatcaaacagcagcagctcactgcatcccggccggccgcgacagcatatggatcaacgacgccgcgcaggccaagggcaaatccgacgagcgactccggcacgcccgtcccgccccgtccccaagttcgatatgaacttagcagacctgttcaccgataatacccccttaaccgaccatacccgatctgaaaatagacccgcagggccatcctaccctcctcaagaatcggtagcccccaacttcacagcagaccagtcttcccggtcttatggacagcgcaatccgtcgatggattactatcccaagtacgagaatccaagctccccacaaccccacccgcagttttactacgcgaactcgccgcaacaaagtgcctcccccggtagcaatacccacggtcatgctttgccgcctgccgagactgagactccgcaagggatgagtcttgatttcttggattttgcgtcgggcgatgccgaaggccacggtaatatggaaggcgaagccaatcctgattacaatactatggctgcaccatccttgggtcacaacctgggccagaatgttgggattgatcttggctttggtatggctatggatttccagcatgactggagtgagaatcccaattacgatcttttggagggctatttctttggtggctctggggctggcgcatctggaggggatgtctaggatgtctgttgttccggttcatttcttttgtttggtgtcttctctcgcatttctttcatccccctaccctgcctctttcttgtcaccttttccccaaagacctgggcttagcaagggttgtataattcggcctgtgatttttcttttttcctgcttttggataccatctagacacatatataccgatttacgaacatctgcaaggacaggaaataattaattctagggttaacaatagcatcgagaattatatagtatgttgtagttgccttgcattgctatgttgcttgcctcgggcagcaacggcgtcaaaacaaacactcccgcctttattttttttctcccaacaacacaattcctgcaatgctctccactcagtcatcgtggcactcaccgcacaaaagaactctgtagccctgttggctgcttcacttcgatttgcgcttggacccgactgcctgacctcgacatcaggtgcccacttcgatcatcgattttctattcaaatcacctacccccgcttcactcccccggtctcgctgaaaaagacctccaatcgccacaaacccgaagagcaaactccgaactgtttctcccaagccgagctctgactagcgtttttgaagtggaccctgcggcaaaccgagaccgcggagcatataaggaggctctgccctttccttttttttttttcccactgaactgaatattgcagcatttggcaacatttgacgactgaggctttgattttgctagggttacaagacattgcattcgtttttgttctgcttagtcctgttcaaaaggtcctgattgcgtgcaacgtgctctttacgatttaccttatccttgggcttaccttctatgactggacatgcgtgggaccgccgattatttacttgaacaccgactatgcaattcgagcctgttataactgcataagttcgccggaaatacacgaacaatatggcgaaatcagacgtgcgcaaagattactatgcggaccttgggctccagcccagcgcggaggctgaagacatcaagaggcaattcaggaaattaggtgggtttcgcgaagctatgttttgaagtgataattggggctattgctaattgagagggaaagcactcaagtaccacccagacaggaacccaggacgagaagtcgagttcaacgccaaattccaggccatccaggccgccaatgagatccttagtgacccctcgcaacgactgaaatatgacaccgatcgtttacgcgcaggatatggcaagtgctacggaccgcccaaggctaatacccagcgcaaaacacaaacccccacctatcctcctcgccctacgccagccccggcgtctgcaaactcgtacacaaagccggccccgactaccccgtcggctggcgctcgacgatacgcatctcatgcgcgtgccggcccgcaacaattcaaacaacaggacaatgcgcaaacaagggctgatgctttccatggctttaataatatgagaggaggacaggcagctggatggcagggcttcgatccttccactgggcgtgccactggtggtgtcccaggtcctggggcacagcgtcatccctttggaacctccgcgcagtctacccgtcccaagtctgccttcgaggctcacaactctcattccaacgcacagtctttcaagaagaagcagggctttgcgccaggggccgctggaggggacgagccgatggcccgcaacacctccgcctatagcagcaacagggctgaacggatgagcagccaatactttaagtctgctgtgcccccaactgcgaagaaaccagtatcacctgagccgcctcaacccaaatcacgccattcatacaccccggagttcgaacgacccagcagaagctatgcccaggcaggcaagggtgagaggactttcttctcaagcactggattaggacgttccgcgaccacgcgtaccccctcaggttcttcccatcaaaacgcccatacaggtaaagccagccctccctctggccggtctgggagataccgtagcgctagcccctcgcccaggcggaatgccaataactatgactctaccagctcgagtgaaggggaacagcctaggcccaaacccaaagctgtgccaaagagtcgactcgggccgcatcagaagtttaccgacttctacaacccaggaacagcaagtcccagaaatggtatggacttcaactccttccttagcgcaaatgggcttcgaaccgttcagctaccagatggtagctacgaactccattcgatgcctcggaatcccctctttaatcaacgtacccttgctgacaacaacggacccaaaggacacacctcggatagcgctgctttcccaaaaagctcgtatcggccggaccagcaatctactccatctggttcttcctcttctgtcaagtacgttaggtacacctattatcaagttgcttcgcgttatctgacggacaccggaattagcactgacccggcaaacaatcccaagaggccccagcccgccgcgtatggacggagcagcacaagtgatttgcacaagaagttctctgctgatgattggcgggatcatttttgtcagttcgatttcttgggctctgcctcgccaaacaaggattcactgcccagatcgcctgcctcgcagaatcggggccgtacaaacttccggaccggaacggctcagacatcagcaactggatcgccgattccaaatcctttcggtcctactcctctatatcaaacttcacagtcatcacagcaagagcaaccaccaacgccctttgcacaggcaaagttttctgcagattcatgggctgaacagcttcggaacctctcgtggaatgtaccagaggtcgagaaagccaaacaaacggcaaacgctgcgccgtctcgtagtccaaacaaacagcctagaacaggcatcaaattgcggaccgctccgcagcaggcaagtgttgctactgaagcagatgaagctaaagaaaccctgaatggccagacttctgggccagccgagacagcagcaccggacgttgaggagatggatatcgacgaggaccttcctactcagaatattccgccgagggccccagttgagaaaccaagcagtggtagctatcccgatgtggcttttcaggctgcaccagatgcgccaccagtcaagaagtccaagcttccttcgggcacagaagcccgcacccctctatttaacctcgagaatcttcgcaataccgtaccattcaccaatacaactggcggaggcatcgagaacctagaagacatccacactactctccccttcgaatcccaagccaagcagcaaaggaccacaagagatgacatccgccctcgcacactccaacttccaaacccacccaagcgaccctgggccccgaaaccagtcctcctggccccgacctccaagcaactcgtcctcccgcgggataaatggaactggtatgtctcagcaatgggagcgtacatgcatgaatggaatgcattcaactgccgcatactcacgcatttcaatgcgcgccaagacgcgaacgaaaccggtctttcgccgggctggatcggtgccttcggagactctacccgtctcaaaataaacggcgcagacgacgacagcaacgagggcacgacaaagacccgtaaagatcttgatgattatcacgttgacgaattcctcatccctggtaccagtaagggcggctttagtgcttatctccgtggcattgaggaggatatccaggtgcgcaagcattgggaagttgcctgtgagctgcatcgggaatgtatccttgatcttggacgattgagggagtggatccgggatggcggcaaggtggtttgagttttatcactgaatgttcatggtaaatggaaagccattgctgaagctgcatctacgttgcatcttcagcttaaatattgggaggctcttctccgatttgatctgacctgtttcctgcagtttggcgtctccgttcttctttcttttttcacttctattgatgtcttctacatgcctttttgatctctctctcttttgcgatgcataatgacttggtgttgttgtgaatacccgggattttatcacatctgcatagatttgcctgactctttcatcgggctctattattatcggtgttttctctcatggagttgttgaagcgggatttgtactaggtactaggagggtttttcttatgttgttcaagcttaaccaatccatcattatcccatggctttcgtcctctcaatgttctgaaggtaactaagtcgacctatttagcaaagttggggattactggtcagctataccacaagcagttaggccagtatatgaaattagcttgatttcaaagcttcaatcattccaagtcgagtaatatctagtacatacaacgttgcatctattgcaatgcgaaaagcctgggatacgttggaacccttgccctaaccctctctgcctcaggctcctcagatgaaagccaaggcatcaaggcaccaggcaccaggccccgccatcccgccggatctgtgacaacgggagttcacggaaaattggtctgactcactgaaaagaagatcaaatttgtgaaaaagaggtcaatttcatatagccgacgtataaattcctcgcatcgaattgttcctggccgaatttgccttgaaaactcacaccggcaaacttgaccctggccccgctatcggctccagacattctctttcgccttcgaacctaccccaccatccaaagcaattgatcgtgcataagtcggacttcgtgaccttttcaagcgtgcaatcatggtttcaatcgttctaggaagtcaatggggagatgaaggtaaggggaccaagaccagacagagacattcgacatgctaatgaacgaacaggaaaggggaagatcacagacatgctgtcgcagactgcgacactttgttgccgtgcagccggcggacacagtacgttcaactcgctttgcaatccctctaccccggagtgttgaagttttcaaacgagccgtcccaaaaaccaacagtgactgaccaaccggcctttttcaattggatacagatgccggccacaccattgtccacgaggacgttacctacgacttccacatccttccctccggtctcgtctcgccaaaatgtatcaacctgatcggtgccggcaccgtcttccacgtccccagtttcttcaaggaactggctgctatcgaggccaagggcctgaagggcgccgcccagcgcatcttcgtctctgaccgcgcacacgtctgcttcgacctgcactcggtcgtcgacggtctcgaggagaagggtctcggtggccgcaaggtcggtaccactggcaagggtatcggtccctgctacagcgacaaggccgcacgccgcggtgttcgcgtcggcgagatcctagacgaggccaccttcgagcgcaaactgcgcactttggacatgtcataccgcacacggttcggagacctggcatacgatgtcgaggaggagattgcacgattcagggtacgcatgaaaatacggccatttccccgttccaccgacgaatgactatggcgcgacagcagaaatggaaaaatcctgattttctgcatccacgtcacaacagaccgctgacaatctctaggaataccgcacactcctcaagccctacatcgtcgaccagctcgagttcctgcaggcgcacaaggactcgaccaacacactggtcgaaggtgctaacgccctcatgctcgacctcgaccacggcacatacccgtacgtgacctcgtcatcaaccggtctgggcggagccgtgcaagcgcttgccctgaaccccaccagtatcaagtccgtgatcggcgtggtgaaggcctacacgacgcgtgttggctccggacctttccccagcgagcagctcaacgaggacggcgacaagctgcagaaggttggacgcgagttcggcgtgactactggccgtcgtcgtcgctgtggctggttggatcttgttctgtgccgctactctcacgctatcaaccactacaccgcgctgaacttgactaagcttgatatccttgatgactttgatgagatcaaggttggtgtcgcttacatcttgcccgatggaaagcgcactactggtactttccctgcggatcctaatgtcgtcgacaagattcaggtcgagtatgttactctgcctggatggaagtcaaacactatgggtgttcagcgctacgaggatctgcctcctaatgctcgcgcttacattgagttcattgagcgtgagattggtggtgttcctgtcaagtggattggtactggtcctgccagaagccacatgatcacccgtgattaaatgcatctcttatttccttctgtttggttttttttgttctcacgagtgactgtttcttcgtgcatattgcgatacacttgggttgtctgatataagggttccttcttgtcccatattcaacggtttagattctcgaaaatggatctggttagaggcggccaaagtcttttactgtttattaccattgttccggtagaaagatgttctgtcaagatgaaaattgagtcctggatagaataatggcaaagaagtagaagatattgtacatgaaatcaaaagtgatggtcagatcttcgtatccagaaaataatcccgcagaacaaccaagtagagtgagtataagacaaagaggagagaagtctagattagaaacacaaagcacccaagggtgtataatacacaagacagtccgaaaaaaagatattggagaacgccgcccaatgccagaatggatccttcatcttttcacttttggctgactggtctcaccggacagcagccttgctatccatgagattcccagacaaattataattgctagcgttgctggcaagagttgatctctgattcaactcaaacttagaaccggaactcgtcgtcgttgaacgagcggcgaggaggacgcgacgagcggtcaccacggtcacctccacgagagaagccaccacggtcgccgccgcgagggaaaccaccgcggtcaccatcaccacgggagaagttgttgcgctcgccacggtcgccacggtcaccaccgcggtcaccgccgcgagagaaaccaccacgatcaccgccgcgagagaaaccaccacgatcgccaccacgggagaagccaccacggccaccacggtcaccaccgcgggagaatccgccctcgcgtcgctggcgggtgccgtcacccgcgcttacaccgtcctttcggttgagacccatttgctgcatcaatctagggctgagctcagggagggtttgcatgttgtaccccacggtgaacatctggttgagtgcctgaatggcatcttgcttgctgctgaagttcgcagtggtggtgccaagttggcccatgtaggacttgaccttggtagcaccgtcacactgggccagaccctcgttaatcttgttgatgatctggccaactggtgtctcgttagagtgggtctgggagagatctgcatcggcagattccaaagcatcgtccaccttcaatgggagacggcccaggcgcttccggtaagcgtcttgttcgccgcggtgcatgaacagccaaccttcaccctccttgccagcacgggctgtgcggccgagacggtgaatgtaggtctcacggtcgcgaggaacaccaatctggacgacgtgggtgacatccgggaaatccataccacgggcagtcacgtccgacgagaacaagataccctcgcgagccctgcggaagttttctgcgctgcgggttcggaacgcctgcgtgagacgcgagttgatctccagcattctcatgctgcccatggaagactggcggaactctgaagagcgagcaatggcgttaaaaacatcagcggaaaccttggtctcggcagtagagttaaagtaggcaatggccttgaaaggtctcaggtcctcgccgttatcccgacgcgtttgccaattctgagcgagctcaagaagggcgggcaggttgttctcaagaccgcgcgtgtatacaagcttctggggcaccctcacgtgggtgggaacttcatcttcactaacggtgttgacgtgcttaaagcttggcttcagggtctgacgaaccatctgcataacttctctgggaacggtggccgagaacatgagtgtctggcggtccacctttgtggggtcgggaagcagtgtctggatctcttcaacgtcaggagcgaaaccctggtccagaaggcgatctgcctcatcgaggatcagagtgttcagcttgggagcagaaacaccagtccaggggtccgagaggatgtccttgagacgtcccggggtgccgatgagcaggtggcatccctcctgttggatcttggcaagaccggcacgtttctgcgtgccaccaacagcggtctgaacaataagaccagtgccaaacgcaaccttcctggcttcaactgcgatctgttccgcgagttcgcgggtaggggagatgataagagcacggatttctgaaggagcagttctggctgagcggcggccaaccttggagagatcgacaccagggtcattcaaaatattctggagggtgggtagaaggaaagcaagcgtcttgccggttcctgttttggcctgagcaaggctgaaaaattttgcaggttagcggaccaatcagtgtcaaggtaattctgccaatcaaacttacatatcatcgcccttgacaatctcgttgatagtaagagtctgaacctcagtcatagtcttgaggttcatccggtcaggttgaatgatgttcttgataatcttgctgtgaatgaaattctccgccgccaggtcggcaaactctgtgattaacgcaggcttggaggtcttgatctcttcaacaatttcctctgcagtagcctctgcagtagccgcagacatcctcgggaaagaggaatggagtgatctggttgcatcaagagatgcaagagacgaaggagcttgccatttcggcagctggctagtcaaccgcgctgagattgaacgaggtgtagtagcgcgcaacgcgtgtgaaacgccaaatcggcgaactgttccaagcatcatgatagaatgctgatggaaaaaattggatggggggatgatgaagttgcaaattgcactcgggcattacaaggagaggcgcaaaaataattacggggtcacatgatccttatcgaaagataacatccgagataggagaaaataaacaatcgtggcaaacgcggcaaacacggcaaacatggcaaacatgcgaaatctgccaacccaacgacggatctactaagaattcttccatatgttgttataaacatgcaatgatttgggggaaaatgcctgccactagtaattgatggggtttgaatagttcctaggcttacagttctacttgcagtgaatatacagagtcactactcgattcaaaagagtaaagctggtagatgtatagctcaagttgtgaattcttaaatatatttgtatcttcatactgttcatccgagtctcgggaattttcttttggatgaattgtggcaggttcacgctggatctgaagcgttgtagtcgtattcaagagactagcgggagcatctcgaaacggtctttgcgagagagcgagagagtccttctaatttaggtcgccattcccgtagcgcactgatgatcgccagtgttacgagccaattcgattcagaagaaaagagtgcaattcagaccaaattctaagtacgaagaagaaagggagaaagagaaactatctgagtgtatctgagtgcgcgttcttcccttcttatacccttgcgtttgtcttcgcttaatttcgtccgaccacttaggaaggtacaaggacatagtcgttccttcctcgtttggcaagtacgaaaacgtgaccgttcctgcctcgtttggcaagtacgatccttcccagatcgtcacaggaagtagcctaagtatatagtcgaccctttgcaaaccttgcaaactttgagccttctcgcttagcaatctagcaaatatacaaacagcaataagtcagtaaatatgcaaatcgtcggaaaagcggccaggaagacggtggacgtttatagtaggcggtcagtctatgtacgaatatcgtcacagtcagtagttctttatcacgagcttcgtaattcaattctgtggcctgcataatgcattgttttggagaaaaaggccaccgggtgccagaagatgatgaacttgacaatccgttcgtccgagtaatggggatacaccttctcccaaaccccacattttggagggtcatagtgatattggcgttttggtgtctcgtgcatgaagatcagcctcttcttcatgtactccatccaacccctggtaatatatattggttgccactcaatagtgaaaaacatcgaatggaaatcgaggggcactgtccatataaagtctgaagtcgtcgacaacgtagtcgatattggatcccttcatgacgaagtacaacagatctttactgtagaaagaatcacgtacagcccaggctttcgcggtttgaccgccatgttttctttttcgtgattccttttgtcgatttgaccttaaataagccaataccgaaccgtgggagatcacactcgagtttcggtttggtacagaatcccagctcgtcgtgttccaatttcttcgtggaaaacaggctatcaaaagccgattatccgcgatcaggttggtagctttggtaccatcgaacctgccaaattctattgcaagaagttcacgaaaagcgagattctctgaagagcattctcgaaatttggaagctttgttgtaggatcctggaggaagatcaagttagtatgtatgctcgtcgagatacttgacaaaaagccaaattgaacttacattcggaacgataacaagcgactcaatcgagcagatttgttcattgaacattcggaatgtcgcatttgcagcgcactccgggttgagaacgcctctctccttccacttgatagcaagaaacacccattgtttctgatcgttgagggaaaggattggacccgttcttgaatggaagtagttttgttgggcggttgtgaagcaaatgacccgaagcttgatgctactgctgtataactagttagatgtcttggatccttccttatgtcagctaagagcatattcgaaaagtgcaaatggatagtaattacctgcaagactggccacttatatagcaatttgaatgccatagggcaagagatagatcaagcatagatatattatatcatatatgttgtgagagtttacgaggaagaaaattgaaatggttgttctattggaaaataagcagcccaggaatacatagacaatgggagccttgaccaataatatctgtaggtaaaaagcaaaagatgctatatgtaacctgccaggtcttgtaaaggaagagtgcactcagttcagaacaactaagatggagagaaagaagaagtaagttgtaaagtgggaagcagccagttaatatagctgacgacgttgcaaactttgcaaacgtcggacatctcgcttagctgtctagcaaacaatctatctaatgcaaactaataaacaatgcacatagtaagcgagcaagcaaacgagcgagaaagtgatagtgatccatgtggatcatgacagcaagtaaacaagcatataatagacaataatatagatcgtagcattcactgtctacattgaggtggcttcatgttatcagcatataagagaggtaactagttagttaggtagcagtacgtagccttagaaagaatggtcagtcatttctcttgattagaggttagtatagcctgttacttttcctattcaaaggaaaattgaatttacactgaagaaaatgaagcccaacttgaccaaactggacacaatctggtgcccatttcccggagggtaaacactatattttcggagatgatgttggttgttgtgcctgggtaggagtgcatatagcagtggatatttggaacttggaggatcaacatctctgaagatctggctatttttttataggccgtcatatttatacaaattgccgctcatttcagttactatgtacatcgtacagcgctatctgtctcttctcatcttcttccttgatgttatatgtcaggtcatgtgctttgatagtcaaacaaacaaacatgtcaaacacagcaaatcagacaaacacatcaaatctaaggttcagcctaaaccttggaaagcgcaaattatcttcgatagccgacaatgggagggtcagcattaggtagaaattagaaatgcaaaattcgctgaccaatacttttctctctgaatcgagcgctagagagatgccaacgaagtatatacgtatctcaggcttacttgctaaccttgcatacgcgcggagagcagatctcatctgtcacataagaccctcccttctcccgaaacaaaacaggaaactcactcttctccacttcactgactctatatcatggcccctattgatgtagttattgttggaggctcattcgcaggcctccatattgctcattctgtgcttcgtgatgtacctgatgcaaaggttgtgctgatcaacccctcaaccagcttcttctggaatattgctgccccacgcatcgtcgccaaacccaaggccttccgccccgagcagtacttgctgccaattaaggaagcttttgcaagttaccggccggacgcgttcgagtttcttccaggagttgcgacggctatcgacaccaccgccaagtcagtctccgtaaccccgaacgagggcgagcccaagaccctaccatatgattatctcgtgatcgcgtcgggcagcactacatctgccactaccggctcactcaccggcacatccataccattcaagcagtcgaatcgcgatgatatggagcagctgatcgagtcggcacaggaaatcattgcaggggcgaaggagatcgtgattggaggtgcgggtcctatcggtgttgagctggctggtgagcttgccgacgcagtggaacaaagcggcaataccaacaaggtttccatcacgattgtctccgcgacagatcgcgtgctcccaatgctcaagtcatccgccagctcggctgcacggaagcagctagagcacaagaaggtcaaggtcgtgacctcgaagcgagtcattggggtcgagactccggccgacgatagctccaactggactgtctcactggaaggtggagacaagctttcggctgacctctatatccccactaccggtgcgaccccgaacaacagttttattcctactcagttcttggacaaggacggttggatgaaagtgaacaacgagatgcgtgttcagtcgaccgacgggtcaaccctgcccatctttgctgccggtgatatcaccaacttctcgatgcgcctcagtttcaaagctatcgagcaagcgcatgtggcggcggccaacctcaaagcggccattgtaggtggtactgccatcaagaccttcgaccagggcgatagcattatgatggtcgtgcctattggtgaaactggtggtacgggacaaattttcggatttgtacctttcggcttcatggtcaagatgatcaagggcaagcactactttattgaaaaggccgacagcgtactcactggcaaggcttaggttatccccatgattaggcgtattcaatgatgcgaattttcagtttataatgctggtgcatatttccggcaatgactacatactgatgtaattaatgcataattttccaatccaagaatgcgaatgtgaatgtgaatgtttttatagcagaacaagaaagattgatgtatacttcatatagtacttcatatagcactccgtatgtaggtccgaaatacactccgtgcaacgtacaacgtacgtcctccataacctgctttatcccaaaatggccaactggtccgttgcttaacaatcgtgtattcggcttgtgtattaatcaacaattagcccatttggttgagatgccgagggtcacggttttcctacctaaaatggctgtctccgtcggcctgaggtgtcttggattcatccgttccccactgttttaagaaaaaactggttccgttgccacagttatgtgttcatcgtacactcgttggacgtacgttaggggcatgggtaggggaattatgcacatcaaaccataatctgtagaaagtggagtatattccctggagcatcaccatctcgagaagcttctccgtgatccatctggtttataatctgaaaagcaaaacggattggtatttcaaatctgatcggtacagccccgctttgttgaacagctcactcatcatataaagagctccctccatacttcgggggatttctacttcccatatttatctttcctactacacatatacaccatgtctaccaacaaagctctcgtgttcaagaagattcctcagggatatcccgttgctgggcaggacctagtaatcgagagcgccgactatgatgctagcgttgccactcccgacaacggtgtcgtcgtgcagtctctctacaccagcttcgacccctacatgcgtggccgcatgcgcgccgctgaggccaagtcgtacgcccccgcctttgccctcgacaagcccattgatagccgcagcatcggcaagatcgtgcgctccaacaacgccagctacaaggaaggtgatgtggtcattggccacgttcctatccaggagtacgttgccctcagcgagcccgagctcgtccgcatccaaaagctggacaaccccctcggcatcgaggacatccgtgtcttcctcggtgcccttggtatgcccggtctgaccgcatactcgtctctgtacgagatcggcaagcccaagaagggcgagaccatcttcgtctccgctgccagcggagccgtcggccagttggtcggccagctcgctaagcgcgagggtctccgtgtcattggatccgtcggctcggacgagaagctcgagtacatcaccaagactcttggcttcgatggtggcttcaactacaagaccgagaagcccgctgatgcccttgctcgtctcgctcctgagggcatcgacatctactacgagaacgtcggtggagagcacctcgaggctgccctcgatgctatgaacaacttcggccgtatcgtcgtttgcggtctgatctcccagtacaactctgccccgtaccccatcaagaacatccacaatgtcctcgtcaagcgtattactatgcgcggcttcattgtcggtgataagggcatgggtgatgcttacaccaaggagcaccaggagaatgtgcagaagtggatcaaggatggctcgttgaaggtgctcatccatgagaccgtaggcattgacaacgctgccgagggcctgattggcatcttctacggcaagaacttgggcaaggctgtcctgaagttttaagtgttttatgagattgatgaaatagcgagatgcctggtgcatatatttttgttgaaacattagctaggaggtattgaatacctcggttaggactgttcagtagggacaatatagatacctctgaaaatagtcaaatcgaacaaacgttatacaaaaagaacatgaacataccgtaagataaatatcaatttgcaacgaacaacttcataaagactacagatatactccggagccacgaagaagatacccgcagggctaaatggaggtttctcatagagtctcggccaatttcggctgggcggatagccatcgaccaatcaaatggcccgtaaaaggatgacatattgactcggattcccgagacctccaacttcatccgcttgtgttcgaacagcgtttctgcttcttcacatcatactctccactcacaatggcttcatttgcgcgctcaactctgctgcgacagactcttgcccctcgggcacccttcctccagaagaatgtcggcgtttcgcaggtcgtcgctttccatgcctccgctaagaagcagatcctgcccccgttgcctcgtaagtagaggccctgccgtaatgctcattgaggcattgccagtggagagatctattgaatttcgtttatgagcagttactaatttgatttttgcgacacagagaccattgacggaactggtatgtgatttccgcgcctttcctaccgagtcttccctctcttttcgatggcattgagtagaaatgcctgcaatgtgtggagatatgcagtcttcattgctcccagcgctcaattaatgcccatcaaatcgcaacaccgtatttcccgaagtcttcgatattaacctattccaatagtgaatgacgccgctcccattcccacaccccacccttccgagggcagctatcactgggattttgagaggtttgtgctcccttttgcgcactacaatgtcgacctctgcaaccccttccggtaaccccggcaagctcggaggaaaaaaccggctaacatctataccagactggtctgcgtcggcctggtccctctcaccttcgctcccttcgccgctggctccctcaacccggtcatggatgccgtcctgtgcactctgcttgtcgcacactcgcacatcggattccagtaagaacctccccgcgctattccgctattcccctcggtttaccccacatctgcaaccggaaatcgcaatctaacataactctaccagggctgccatcgtcgattacttccctccttcccgtgtgcccaagacccgtgccacctgcaactggctcctgcgcgcgttcactctcactaccgccgttggtctgtacgagttcgagacaaacgacgttggtgtgaccgaggctctgcgtcgcatctggacggcatagagtgctgttacggttccttgtttcagaaatattgtctttttatttcctttttatttcctgcttaccaatttggttctggtccatccaggcgttccgtcccgcctctgtgtatgtcgttgattgtttttcttttgtctctgagcccgaatctaatgatcagtgccggattcctgctgctcagggttgtgagctatagaaaatcaaatggaatataacccctgtacaagacattcttggtgctttttgttttctgtatagtacgtagtgtagatatgcaaccaggttctttgtacactttaaatggtcagtagtattcaatagagtacagtgcttctaccaacgtttggattgctttctaatataagttctaatccttttatccttttaaattctatcagaatgataatgtaaagacacaagtagacaaggctaacagcaaacaagaggatctaaactcatacaaaacacccctcattcatcctcgatctccccatcatccccagaaaaggcatcctcatcatccgccttctccataacagtctcaataatcttgagcgtcgccttgagcggcaacccaataacattatcagcactgccctcaatcttctcaataagaatcgacccaagcccctgcaacccataaccaccagccttatccgcgccctcgcgcgtgcgcacataagctaaaatcaactcatccgtaacatcgccatcaaactgcaccaacgtctcctcaaccatactctcaaccgcataccccgggtctcgcgcactagccaacggcgccatcgccacaagcgccgtgtagaccttatggtttccgacgtcacgcagcgagcgcagcatggccacgtggtgtgcttcggagcggggcttttccaggatggtgcctgtagacgggtcgacgacgacagtgtcagcggccaagatcagggctggctcgcccttggcctcgttgttgatttcttgcgcgtagactgcttcggcttttttcgtcgctgttgctagcacgtactcgagcgggcctaggcttttgggtaggtcttcctctgcgttggaggggatgatttctatgttcgggaggcccaggaaggacattatgtgcttgcggcggggggattgtgaggcgaggattacgcgcctgctgcggaggctgttgaggatggggaggttgagcggtggtgggcgtgggaggaggagtgatgcacggttggcttttgagatgggtttgtcgtaggcgggtggtgggtcggattcgggggcgtcgatgttttccatgtgggataggagggcttctttggagtctgtcattttgggcggttggtcgttggtgtggcgggcgatgcgatgcggggaatcaggtgctttctccgttcgcttgtcgaggcaaatggtctttgtgtgcggttgattgaccttgcaaggatatgcagggatattcaattggggatcccgactgtccacgagatcctgtatgttacaggtttgcgtggagtgtagaggctgcgtttgcttcaccctgcaggggctcggcagatatcaggcggtaagccgaagttcttcactatcgaattttgtgcagagtctatatcggtatatcaccttggtcaccactgcattaattcattatttcgtctaactttccgaggatatactcctttgtataatctggttggctacctaggaagtgcatgactgcaattattctccgtaacctgttcacgtgatgcgaccgaagtacgactcggtcaaataattccgactttaattgaagtaaggatgtcgctgtgggtgctcagccagagctgaaaggaactcgatttcagttaaccgttgggaaagaagaacgccccagttgcttcgcagcaacagccatgaccatccatatacattctggtaccaggagcagaaacaaaccagaaaaaagcttccatgtacaatgatcaagggcagtaggaagaaaagaagtaaaaagttgcggcactgcgttgataatcgttcagtgcattgaatgcggtggaggatgcgtgattggcttcaaatcatatgggaagatcaaatctgccgggcaacgaggaagccctgctgatcatttccaagatctcattcgtaatacagggctggagtagatagacaggaaaatgaaattcgtagcgtgggtataagttcatatggtccaaaatttgagaaaaacagctcggacctcggcacatgcctgcagccccggacccccatcgaccagcggaggggaagaggggccgctggataccgaaccaaagcgcaatgaaatgtcgaggagaataggatcacgttgggcggaaagagtcgtccacgcggccgcctttgctctcgatctctgcgatgagatcgtggcgttcttgcagctttacgtggatgaagtccacggtcttctgcaaaacgatgctctcactccgaccctggccctccagaccaggcaccagctctgtgaggcgatcaaagccttcgcgaatggctgcacgtcgtttttgctccgaggcaatatgattgctctttttttcttgatcggtaagacgaggcttgtccttgtcctgggcagatccctgcttggatgtcccattaggcgttgaggacgaccgatcatggtcatcgtctggattcatcgtgtgtttgatgactggaggtttttgagagcaactgaaagcgtatggtagatgcgccggttgtatacacggtccggggctcttagtatcgattggacgggatgtatagatgtccttatagctctgaggccccgtctagtcaaggcatcgatgagggaggtgattgtaatcggtaaacaacgctcggtggaagaatgtgaaggagtatgagagacacgggaaagcgataggaagcgataaggccatgggccaatgcggagtaaactggagggccgggaacgggccttggcaacttctaaacgtcatagatgggtccactgaacacatcttgctttttctcccgcccatgtcaattttgtcctcacaccaccttaactttccggtccaatttactaccaaagatcatcattccctcatcgggatttctacttagcgagactactgccgccactcatctccaatcttaaaccatctacctagcccacattgcgaaattatcaacgccgcggaaatcctgtaccaccatggccttggaaccgctccgcggctcatgctcttgcggtcgaaatgaataccaaatcaatattccggacgacgtgacaaaccatgccgaagtgtactttgacagcagccgagacaatcgtgggtaaaccaagccaagcttgccgatctcccggctaatatcgcatcctaggtcgatttcacggtacacctctctcggcgtggcttcgagtacctctcagctggtaccaatcccacactcagtccttcttccctgatgaatcgcactcttccattcgccgcatccattcgccccgccatgcgccccggactcagcgtgtcttctgtggctactgcggtacacccctgacattctggacggaggagcccatcgaagaagccaacttcatgtctgtcgcgatcggcagtcttctagtggacgaccagcacgcactggatgatctaagattgcttcctcgcgacttttacgaggaagctccccgtgctggtatctcgacctcatctgatctgacaccaacctcggagaccgcttcatcctcggtcattgttccatcgactactgattcttcggacatctcaactagtctacagcacggtataactggaggaattccttggttcgaagagatggtagaagggagccgcctgggccgtgtgatgcgtactcggcgtggtatgggagtcagtgacgatcaatcaacttcgatccagtgggaatttagcgaatggcatgatgatggaaccggtgcaggtggattcctgcagcaggatccggactcgagcgtactcttcaggggaaatcgcaagcgggtgaatcaggccgatactggaattgagtctccaacgaagcgagcagggtaatatctgcaagtcccaagcccccattgacgcgtcttgagcttttgatgtttaatgtaataaaagataaattgacgctaaagccttttgttttatttttcggacttggtgaaaatcagaggacggagagtaacagaaagacaatcaatactattcgctagagatcttgatagaaccatctagatcaaatgagtacatatgctatatccatcgctcttactccactacaatatagtttaggaattgatgcttgtaccccgccacacctgaaaatcaggtgcgccttcctaattgggtaccgctcctcccttgacaacagtcacaatctatagaatggaatgaaagacagtctctataatatattccgtcatacagtaagagctatataatatatatattatttggtatattaaggcttagatgaaaaatgtagtactaaaaactagaatctatgcatgtaccttttgtatggcctgcctagtaaaatgtacgtccgttgtagcccactcgcttgcgagaggatgtaatttttgtaacaaaaatgtaaggaccgataaaacaccttacaattaggtggtcgctcacgtatgggtggcgagccgtaatttatgtaacaaacgtaaggctgaaattttgtcgcacagcatacccgaaccggtcaagcgcggtccagacacagcctacaggggcctgaccaacgtctcttaatgacttcctaggctcttttttttaccagtgacaatgtacaaccctttgtcaagtacagatcatggtatactgtggtaaaccaagcaaaggatgcggcgagtgcaggtccaggaagattcggtgcgaccaagcccaaccggcctgttcgcaatgcaccagggccaagcgggactgctccggatatcgggaccaacaggccctaatgttccgcgacgagagcaaatcagtaatccgaaaagcggttgcggcctcgacacataggaaacaagcggaacgatcgcgtcgcagtgcaatcccagaaaggaatcctgtacggtctgggcttagtaccgcgccagtggggcaggtcttggacttccactctgatccacagcatatcaatcttgcgcgccagctcgggaatcgcccattggaggtccagccgtcacaggagttcgaaaccaccaaaaatgaagcaatctgctttttcctgcgatcaactgctatccccggcagtttcttgactactgagatgatctctgactctttggtacagagcggaggcactccgagtcagagagctatgaaggcaagcgtagttgctactgccatggctatgctctcccgggtaagagggctaccatcgcttagagatgtagcccaccgggagtatggatccgctttgagattgcttaatgccgctctaaccgaaatggaggaggcgaaatcaaatcaaacattaggcgctgtcatgctgcttgccaaatatgaagtacggaatttttcaccccctcggatggtttttgttgactccctgtttctaggtgatttcgtcaagagccccgaatgaaattgagagttggaccaaccatatcagtggagcaatggccctgctagatctacgcggcgctgataaacttaagactgacaccgatctccgcttgttcttataccttcggtatcagattgtgagtgctatcgatcactccttcgatcactccttcgatctcaagctaacccctcaacagaccatcagttgcctacaaagagacgtgcgcgtgcctgagtcactaatagaacaaacgaaaatcgcgatgattcttcagccagaacaagttcacggcaatcggctactcacgataattggaatactatcgaaccttcgcgcagacatctgcgccaatatgtacaacgagcaggagatcatatcagcagcgtcggctatcgaagccagtttaattgcctggctggcagctcttccccccgaattcaactataccacccatgtaatcccccccctcgacttttccatccaaaagcgactccgaggcataactccatacgacgatcaataccacgtgtactcctccgcctgggtctgccattcgtggaaccaataccgcagcgcccgaatcatcgtcagcgaaattattctctcccgtgtccggcgattatccgacagttcctctatgactttgttgtccgaagagttgcgtatccaatgcaggacacttcgatcgacgatccggcggttagccgtggatatctgtcgcagtgttccttttcacttcatcggtcaccaggtagatagggtgtctagtctcccgccgcctgaacactacgttgcgggccttgtgctcctctggcatctatttgtggctggggttgttgagaacccccaacacaggctgcgccgttgggtagtcaagtgtcttcaaatgattggaaacacgatgggtatcgaccaggcgctggcagtggcagatattgtggctgatgatcctggggttttacattccgtgaccgaggaagaagactctcactcttcagatcaggatctgacgaggcgagatctagttacgcctagtggaaatacttgcctcggggtatatagcgactgatatagttgtctttcttttttcattcttgtttattatgccgacaatttgtccgtttcttttgtgttacagcctagggtttgggattagcgcctcatgtttcggttctcattatgactcacgagttgtctctaacaaacaatcaaaggaaatcttagatcctctgttatagtccatcatagcgtccaacaagatcccagaaaaagtagagcaagtggtcttccgttcacgttcatcctatgctgcgcctcctgcattagaattgccgtatgcggggctgtgtttgctccgccatcagtcccaaagcacgcttccggactgtctgtgcactttaaacctcttcatacactctatatgattggttaaaaagtgacgctggagcccgataattttaccttaccctgcggttgcccggccctacgaatgagcgtctctcaacatccctgttaattacaaatagggctgcagtgagtcaaatctgcctcgcaattaatgatggcgatggccttttcgatctttgatacacttagggcggccactagattgaatctcatgtgttaatgtccgtgtgttgatcatgcgtcgggcgtaaatccgtggttggttagaagtgtgccttggtctatgcctctaccctatactactctttgtatattgggtttcacagctaagcccctgatggcagacagtagatataaagaagttgtttcccgggtcagatccttctagggcataccatttcaggatatctgagcagtctctaagacaagtctatttgacatatattcctcacctacacttcattttcaacatacaatcttcagccatgggtgtatggaacccgttctcaaggtatcggaaagagcgcaaggcagggacaaccattacagggaccacagtgaccacaccgacgcatcgtccatcatggtcccgaggccgtagccctaatacatcaaatgcccaatcgtcagaccgtccaccaccgtatcaagaagaaattccaacaatcagaatcagcgccccctccgaaccagaatctgattcccagtacgccttcctcggccaattccataccatttttctggtagacgatagttcaagcatgagaggtgagctttggaacgaagccaaagaagccatcgccgcgatcgcgccaatctgcacgaaatatgacagcgagggaatcgacatctacttcatcaaccaccgcccaaagcccaaccccaacaggtccaactacggctacggttatccctacaactccggctcgggctacaggcgcagccccagcggccatattcccggggccaatttcgactacaactacagcccgggccccagacgtccaacactcgatgccagcggataccacaacatcaaaaccgcgcaactagtaagcgagatcttcgcctctgtcataccctctggtggaaccggagtcggggctcgactatttgatatcctggacccatacacgaagctgctggaagcaaaggagacagagagacaagcgcagaagcacgtatcgggagttttggccaggtcaatcgagctggagccggtcgagtcggttaagccgatcaatatcatcacgatcaccgacggggtgtttacggatgatgccgagagtatcattatcaagactgctcagactctggatggccctgcttgtcgtgctattccgtggcaggttgggattcaattcttccagattgggaatgacgagatggctcggcagtatttggatgttttggataaggaccttggcagccggtgtcatgatttgcatctcagagatattgtcgatactgtttcttggcgaaatcgggctggggagcggttggaagggtatgggattttgaaggctgtgcttggggctgttcataagaagttggatcgagatttggagtgttaggtggttggtttctgatttatatatttcccatccaatcgcatattttgactgcaagtgcaaaagtgacatatcatctgcacgaggacgcgctgggggtggagaattctcggatataagtttgttagctgaatttaatttattctccatgaccaatgagagatactgcaggctttacttcggtatattagagctgagcttgcagctttgcgattttgtacaattcatgcactcggtagcaactgatctgttgatctagtcaatctggtcagcctaattgatccaaccgatataattgctctattgctttatttaatctaattgtgcaaagtggtaccttgcataaagatcgacgaactacaatgacggggctggatcggaaagatcgcaagccacaccatctgagaatccgagagtccgagaatctgagatcacatttctttctttcttcttcttcttataacaatcttataatttctcagatcagcacgcatcattgaacacttccagatccactccccatcacggccgaattttatgatcgtcaagtctctccgcgcgccgatctcctaaaaacctcgaattcgtctcctaacccccttctctctatttctctcattttcagccttcaaggctttgttctatcatttctacattccaatcatttcaaccgttttaacctcattttcctcccttgtttcaacatccctgcagcgccaagagccctcttagcgccggactccttacgcaggaacatcaccaacccgagtggtcggcgcgtcctccttctgctcccccattggtcaaccttgtcgccctgcacagcgtcggggaaattgcaccctcgcggttcctgaagcaatcagcctatttgattgtttggtttgagccctgtgtgtccaggccatggcatgttgttctgcggcgttgccccgaacatacctgaaacaaatcgtttattcttagacctgtcacttgaacttgaaacaggcacagcgtgcttccaccggctgtaattatagaaccgcctttgtcgagttggctttgtgtctgtgagctccggggcttgttttgtttataagctcggactttcagctgaggtccaagggtctatagaccgttcttcttgttgctttgcatttgtattctgggattctgtctttagcattttggtttctgattttgcattgttgtgcattttctttctctgatttgttctgttcatttgtgctattacctgccttgctcagcgatctctcttttgctctttttcttattgtcttaccttgcgatgatctcgactaccctcatgacttttttactgtgagtgcgcccagtgcaattgatatctccatgcgctgaccgcaattcagtattaccagaccagaggtccggtcggtcaagctgctcggatcatgggataatttctctaaacaatatgcgatggaaagagatgtgcgcgtcggtcccggaaactggagaggatgccatacctttacggatatgataggtgatgggccagacaagacccaatggcgaacagggggtctgaagatgggtggtacttactggtattatgtgaggctcaattcaagcatatgagatgaaagagctaacgaggaaaacagtatctactcgataatgacatagagtattacaacgaggcagagcctacgaccacaatgtgcccgcttcttccggggcaaccaatgaatgtgctaaatgtccctatcattttacctgacagccgctcacatggacgctcggtgagtgccagctcgcaaaaatccgaacatcttcggaccatgaatcccgaagacaagttcatgaatccgcggaagccgccgccccagcctcagtctgtacggcttcagacatctgcaccagtatgccgcgaaccgagccccgcacggtctgcgagtagatctccgatggctggaatccaccggagtgcatctcagccgcacggtgctcctcggaagggccataagaaagattcacgttctatgtctcctccgagagcacgagccattctagctgctttaaggcaacccgctgaggtggatagaaggttcgagtcagtgcaacatgcgaatgcttctaagctagcacagcggcagaaagaggctgttgaggatcgccgcaatgtccctggaatcaaggttaacaccggagttgcgattccatcttcgagccctcctgacaaatttggtctgtccaccatccaaagtcgtcgcgcgatgaaggcacccgctggggaaacggcaccgagccgtcttctcacagtgcagacgcgtccggatcccccccaaaccagtcattctcgcagcgtaacaaacggaaacaccgtcgaatccgacgaaactcgtgcgatcagggaagccctgaaggatatcacttgctctggtgactttcctactccaactgccgtgtataccaaagataagaggctccctacacttccaaatacgccatcttcggtcatggatgaagcagttcgcgctatcgacgagagagatagggagatggatgacgagatcccgcgcagttacttctccagcatgacagcaacgacaatcgactccgcccattctagctttgtacctgaatacagtcggttctccggatggagtaccgacactgaaaccgactacaacccacgcgaatcgatggtatcggcctcatctaaccatcaccaggacgagtcttcggcggaaagatggacaacaccagacctctcgcagtctggcgatggcgcaaccaataccgaccctaataccccccacctcactgtctactccaaaccctcatctccgaattcaccctggagcgtcggtctccctcaactcaccgtgtccctgtccacacctggcctcgacttttccgggttgggaatcgagaacatggatgaagtggagagcaaccccaagcgccacgctgctctatttagcgcccttgaatcaatggaggccttcgcgatgtcgcgcagccccgacagctccccgatcctgctctcccaagcttccagagactctgacatggagcaatatcgctctttcacagagccgaaagcagagtcgaaaatgagcgaaacttccctcgagcggattcggtcccgtcgtagcaatgcttcgttccagggtaatgctactatgcaggagttgatggatgagctcagttatctgaagaatctgatccaggctgacatggatggggtgccgttttgatgagactacctcagggattttctcatgttcttatatcatattactggcgctggtcgtcggtatggagtttatgtaattcgtacatatatcatttagctctcaatagaggagacattatatcaaaagaaatacatcagaaagaaaaacaagtctccaatgtgtaaatttaaccgacctagtagagagtagagtcaaattgatgtaaactccgtagtgacgttggtgaatccatatcaacagatcggacgaaacaccaaacacacgcgccaagaatccctctgtatccaccacccgcgatcaacagcttcagccaaaaagaaacagcgccacctcaattcttgaacctttgatgttctcaagaataataatgggctgaatgggcaatttatcttgaagaaatacccagaatgacagtcgatggcccccaactgacccccgtcggggagaagtccctaccagcaaaatgcaagccgcaggccatggcgtactgtcccacgatggacctgatagcgctggcgaccgaggacgaggaactgcgcgtattccgactcaatggccagcgagtgttcgggggttcttttggtggagatccgtacctaggcgaggatgaagaggacggcgagattagagggatggcgtggaaagggaatggtaagtttgaatttccttgtcgctgagctttgctatatctcttttcctataatcggatcttacccgtcttgctgtttatttcacgcgcgctcatttactaatgctacaccaggtcgccttctcgctgtcgcgtgtggagatggctcgctccgcatcatcagttcgtacaccgggaagacggtgcacaactatcagacctatcagcagaaagaggaacaacccaatcccactgagaacccgtcacccaaggcgacctgcgttgggtggggtgtcaatttcaccgatagcaaagccgcacagcggcacttgcatgaatccgcgggccaggtctccatcgacgaccttttagccccgggagtgtatccctccaaggcagccatcatgctcaaagcagacttgccaagagagcttgccttgctggacattgagagctcgctgccgaagctgagcactctgcctgcaacaggaggcgaggatgacgttttcagctcgcgcgcgtccctagacgccatcttccattcatcgaaagataccaatgactcggtcgatgtgctctccgtcgggtttagcgatggtactgttcacctgcgtatttttgattgctttgagattggctctttccctgtgggaagctctcccggtatccccgactcgtgccgtatcttgcggcatgcttcgcacccgttgagctctacacatgctctactgacatcgccggtcaagggagacactcgtggtccgcttgagcttgtcacgatggaccttcgctttattacgaagtctgggagatatctgtctcttcttgcgtcgaaaactactcagcttcagaatttgctccgctatattggtcaggtgcagcggcagattgagcttgagtggaagaatgcccaggagcttcctgcgcgcttcttgcgtagtgtcaatgaggacttgaaggaaaaatgccagtgtgattttatcactgctatctatcacctggtggtcactggtcattgcttcgagcccatgaaagaattcctcacggatattgttggagaaagagtaagtgagccttgccatttgggagatggtgtgctaatggacggcatagggccacaagagatgggataaagctgtcttgggcggctacgagaatatccggcgactgacacacgaatgtctcctcccagccttggagcgcagtcaagtacttctcagtcgattggttggattgtctaaattccacaagctaagtgatgtccttgggctggacacgaccaagcttaatgccatcgtggagacacttgattgtctccatcttcttgcacactctgttctcacgcatgccaacgaggaaatgggacaatttaccgctttctctagatggcttcggtacgagattcaggttcttaatagcgagcccttgtcgcagacacgggaagaactgctggagaaaagagacttgttcgatgtccctccaactgtgaagtatatcaaaggcgcattgaccaagagtgctctacggaacttcatccgccaacttcctatgatcggagttgttcagcctcctgcacctcccgctgataagtggcttccagatggccacgaccgctcgttcttcgatactttcaagtcacttcttcaacagcaacgcgagtcccgggacaggggtggcgatggtacatcgatagagacgcctaagctcaatgacttgacgaagcgtctggggatccagtttgagaaggtctttgaagagattgccttgactcagcgcagaggaattctctatcgctcgcctttgacgcttcactctgattgcgaccaagaggttaccgatctgactttctgttacgaggtagtttaagactggtgacttttgtatcgttctaagctaactttcgctacaggatgctatagaaggccagccttgctcagtatatgtcgctacccgatcagtcacatcaaaacatcaaggttcgtcatacaatcaatcatcaaatccagtttcttatactcacgcaaatagtctatatctaccgcatcgtccttgactcagtcggtggcgtcagctcaacaagaagtacctccctcgcaaccctcgacctccaaaacggcgaagtccgccaactccaattcgtcaacgacgacacactcatgattctctggcgcgatagcagtaagtcactcacacatcgacttcatattcctcctctaaattctgtatgcaatctaacaatctatcgaacagaaggatcctcccatctcctcaacttccccttccaacccgactcagcacaaccccaaagcgaagcaagccacccattacctgtagtccttggctacattgaatgtgacagcacgccatccgttccaaaacctactaccccgcccacgacactagatctctcgcctgaattccaccacacgagtgttcttatacatatcttcgctctacatggccctaaggcacggcctatccatgttgatgtcaatggacggaagggacggcgcgctatttgtgttttgtatggggatgctatgcggtacgaggttttggacctagatgctgcgatgggagaggacgaggacgaggaagacgatgaggattaccaagaggggggtgaggaggaagatgacgacgacgaggaagtcttcgatagtgatgaagaaaataatgagaactaggattacattgttatatgggaatctgcgtcattcacgggatatggtagatcaacattgcatcacttcccggtctagacctgcataacttcggataagaacttcaagtaatcctgaaccagttgggggaaaggggagctttatgttatagttgctggcagtgagacttatctgcgcttttctagcgtcccttcttccaagatatatatgcacctatactgtgatagttagttcgttgatagtattgctgctgccctcatttataccgaacgttgtatagtcagatttctgtcagtgagttatgcatattcattgatcctaccataccttgctttacaccctgaattctgtcatatttcaacaccttataagttcagataactataagtccagatggtcacaaattcaggatttgaatttattagattgtctcttaagcagcaaagcctcataaacaaagaaaatcggctatctaaaacttctaataagaagtatcagggttgttgatccattcagaccagttgaccctttggggtggcttagctaggtcgaaccagtagggctttgcctcattccagggtgttggcttaacctcaaaccactgacggaagccgaccataaaactataggctataaattagtaaatccctttagagcaagcacagtgcaactgataaggaggatcgtacattaccggaggcggaataccaaactaaatgtgagaacaaagggcaaatgccaataatttcggtctcactaaaaggggccgatgttagtatatatctataataggcaacgtggaatagaggcgttaacttcttcccgaatattgtggcgttgatcaacactcatatcccagaagacctttgcgccaagactatcccctagctaaataccaggcacttgctcccacgcaacgagaccaggaagccagcgggtacaagagcagagctctcttgctcctcttccctatatcctaggaggcggggggtgacttccgactgcttatcggtaagagtcttatatgctactagctcgggcggagtccacgccctagcttgcctagcgcgggtagtataatcgtcaaactctgtgcccaggtggggcagttgcttatatatcctaacgaacgcgattttgctagcatctccgtgtttgttgcactggtacttgacggaggcataggagatagcggagtggtcgggattttttcggtgctcgtgttcgttaacgcgcttgaggacaatccagcatcgaagacaatactacggagctcggggccccggaaccaggaatgctgcgaagtcatttcaattgataagactgaaggagcagggtacggaaacataatgatggcatggcgaagagggagcaagttgatagctaagtgatgtaagagaatggtgaactttatttttggcatcgtgagtgagaataatctaagagagtgttcagttggttaacttaagatagcaatacttcaatatgctggcaatcttttttttaagttatttctctctctcagtactataaaagaataatgagtagcagaacggaataggtacgatataaaatggcggtaaatgtcataaaccgtactccgtacagaggactttctctatgtagacctaggaataagctataatcctttgcttatttcgttaagtctccagttaagatccaagaggcacaaatttcatggtcaccaagctacaaaaatgcaacgaacacaaggtgaacagcaaatattgatcttctcagatgcatcactttttggtaaaaagtccttggctgcaagggagggacccggcctgaggcagaagatcacgtgtatatgactaacccctccacagggccaatcagagattgccccccgtagaacctcacccattgtggtctttcgtgcttcgaatctttgttttagtctcttcacatatcttgcacttctacagctattcccatctcctccagacctttccacccaattattgtgtgttgaaatctgggcgtgcactcaaggcaccttttcctctctgcttctcgtcgcggaaagacctagtgcatgccgcctcgtcatatccacaaaaacacccgtcccttcttcccactcttccacaggaaatcctctttccaccactgcttctatcgtggtgatcagcgagtgttgaacccttgattgatccgggtccagaggggttttaaagtcttttttctaatctcttctccacctcttttttccgtcttttttctccccccccccccccacatccctcatttctttgcacatcatggacgcccgtcaggtgttgcagagtaccctcgcgccagatgcggccgagcgtagcaatgccgaacagcaactcgcccacgctgcggaggttgacttcgtatgtgtctcctcttaccccccttcgtcctgtcacgagccatgaaagatttccccaggattccgaatactgatacttttgtcgcctgataggctgcctacctcatcaccctcggtcaagaactcgccaacgaaagcagccccgctcacatccgtgtggctgctggtatcgctttgaagaacgctttcactttccgggaccaagccaagttgcgcgaggtgcagcttcgatgggcccagagcatcaacgccgagaccaagtcacaggttaaagagcttgcgctcaagaccctgcagtcacccgatgctcgcgccggaaatgctgccgctacactgattgtttccatcgccgccatcgagttgccgcgtggtgagtggcccgaattgatgggcattcttgtccaaaatgtcgctactggagacgacgcactgaagcagtcatctctcactgccatcggttacatttgcgagtcgcaagatcctgatctccgcgccagcctgacacaacactccaatgctatccttaccgcggtcgtccagggtgctcggcgcgaggagcagaacatggatgttcgttatgctgctatcgccgctcttagtgatgctgtcgatttcgtgcgaaccaacatggataacgagggagagcgtaactatattatgcaggtcgtctgcgaggccacccaggccgatgaggtccgtgtgcaggctgctgcattcggctgcttgaaccgcatcatgggatcctactacgagaagatgcgcttctacatggagaaggctctgtttggcctgagcatcatgggcatgaagagcgaggaagaggaagtcgccaagctggctattgagttctggtgcacagtctgcgaggaggagatcgctatcgaggatgacaacgctgaggtaattaagcgcataaggctgagtgaccttgaccatgtactgatatcatgttactttaggctcagcaagagggcgttgaggctcgtcctttcttcggatttgctcgcgttgctacccgcgaagttgttcccgttctgctgcaatctatgtgccgacaggacgaggacgctggtgatgatgagtacaatgtctcccgtgctgcctaccaggctatgcagctttacgcccagtgtgtgcagggtgatgttattcagcccgtcgtgacgttcgtcgaggagaacatccgtaatgaggactggcaccgccgtgatgctgctgtcgctgcttttggcgctatcatggaaggccccgaacccagtgttctagagcctctgatcaaacaggccttgtctgttttgcttggcatgatggaggatagctctatctccgtccgggactccaccgcctacgccctgggccgcgtgtgcgactgctgccccgaggtcctcgatcccgaggtccacctccagccgcttatctcttgtcttttcaacggcctcgccaactcccccaagatcgctagctcctgctgctgggctcttatgaacgtcgcagaccgattcgctggtgacgatggctcacagaccaaccctctctcaaagcactttgaagacagtgtgaagtccctactgaccgtgaccgagcggtatgttccctaagcgataaccctttgattcctttcatctaacgcccgtacagacaagacgccgataaccagctccgtaccgctggatatgaagttctcaactcctttgttatgaactctgctaacgatagcctgcctatggttgctaaactctcagatgttatcatccagcgtcttgagcacactgttcccatgcagcagcaggtcgttagcgctgaggaccgtattctcctcgaggagatgcagaccagcttgatcagtgtcattctggccatcgttcagcgcttcgaggccgagatcaagcctcaggctgaccgtattatgagcgtgctgcttcaagtactgactacccttggcgcaaagtcgagcgtgccggatgtcatcttcgccaccgttggtgctattgcaagtgctcttgaggatgatttcatcaagtacatggattcatttagcccattcctgtacaacgccttgggcaaccaggaagagcccggcctctgcgctatggccatcggcttggtcagtgacattgctcgtgctttgaatgagaaggtccagccttactgcgacaccttcatgaacctcctgctcaagactcttcaggtaagattgttccttcatatatatcgagcttcatatatatcgaggttgacgtctaatgctaattttacaaacagacttccaccaaccagctcaagcctgcgattcttgagaccttcggcgatatcgcccaggccatcggaaccaactttgatacgtacttggcggtcgttggccaggttctccagcaagcctccagcgtgaccaccagctccgacctcccatacgacatggtggattatattgtttctctccgtgagggcatcatggatgcttggggtggtattcttctgtcctacaagggcactccttccagtacgttactcttcactctccacacatacgatctcaacatgctaattagcttgcagtcacccaactccagcctttcatcgagtctatcttccagcttcttcacattatctcccaggagagcaaccgcagcgaaggtctgatgcgatctgccatgggtgttattgggtatgtcttgccggcttctattctcgattaaatatactaactattcaatagtgatcttgctgatgctttccccaacggagagctcgctgtttacttccgcaacgactgggtcacttccctcgtgagagagactcgcacaaccagacagtacagcgagcgcacaattgagactgcccgctggactcgtgagcaagtcaagcgtcagatcaacatgggcgctggtatgtcgtaaagccgtgattatgtcttacctggttgattgccactgattctggtccggtcccgtctgccaaagcatctgccacccacttcgggcctgttggtgtcaatgccacaggtcctagggtcgcttgagcccacacccaatcggtgctcctgatgtgtacaggatagctgttctattctcgacgttgtcgtactgaacgcttgggcggtagcctcaaatccctctcccctttatttcccagcacaggattcccctcccataactccctttggtcgcgaactccgttcccccatacctttgctgctgctcaattcccttatgacacacattcgaatgagtaacctttcccaatccctgtacggccctgtctgattttcctttttcttcttgatacaaccctttcaccttttcatctttcccaatccccttctatgttgtttttaattagacaagaccccgcccctcgcatattatagcattgcgaatcatgtagcccaagaattcatgtatcccctccccctctactgtgctccccattcatgtatcctttcccctcatgtcaccccctccagaaaagagtcattgtcatgaaaaagctgtccctgatttcgtctcccttcctcgtatacaccgatatttgcccacaaccatgctatcaagctggaaacccatgtatagaaccgcccatctgaatctttcccgcggacggaataagtgaattatgctgctgatgagttagtagtagtaggagtaaagatgtttgtatcactatctgttttgatcttctaatggtgatttttttctttttttcgagctctcattttgcttctatactttgtattatgtaggtacaatctggagttccagatatattattcattgtagttatctggtacagttcactagttaacagaatagtgatgccttctaaccttcgaaggttcaggcaccgacatgtagcagcttatcaccacgtgaccattttctgataagggctacctcacacacaaaccctacccgcgcaccacccgaaaaccaaactttcaccgatcgtcagattcttccgcttcaaccatcgacgaccatctctcgaggtatgtgctatatcctcccccaacaacagccttccagctagtctggggatgcaatcatcttgtctagattgcttccttttgaattatagacaattctcaggaatcgcgatccaggaagccaagatgatacgcatctcccaactcggcacgggctgaagaactccttgcaatgcaaaaaaggggcactctttgcgctcgaagactagtggtggctgacttaaatcgccttcgtcgaacagatacctcataatccttacttttaaacgttacgatttgagaatctcgattctactaaaccgtcaaaatggtcaagacctccgtcctcaacgatgcgcttaacgccatgaacaacgccgagaaggctggcaagcgccaggtcctcatccgtccttcctccaaggttatcgtcaagttccttgctgtcatgcagaagcacggtacgtgaattttgaaattttctcgtcttttcatttcttgttgcgtttttgtttcctatgacctgtcttgagaatatttgtccccccccccccccccccccccccccccccccctccccgccccccgcccannnnnnnnnnnnnnnnnnnnnnnnnnnnnnnnnnnnnnnnnnnnnnnnnnnnnnnnnnnnnnnnnnnnnnnnnnnnnnnnnnnnnnnnnnnnnnnnnnnnnnnnnnnnnnnnnnnnnnnnnnnnnnnnnnnnnnnnnnnnnnnnnnnnnnnnnnnttgttagaatttttgcccccccccccccccccaattcgggctgataactaggcggccggtctcaatcaacctacgacgtctgccttttaagtgtccgatatattaatttgcgaagatcttacacgtttccaaagcgctgttatggctttttctgtatttgacgacttttaaatcttcacaacatactgattctttctttctcaggttacattggcgagttcgaggaggtcgatgaccaccgctctggcaagattgtcatccagctcaacggccggtacgtttcacgattacatccaccagtctccatggaacatcaagctaatgttatatctccagtctcaacaagtgtggtgttatcaacccccgctaccccgttcagctccgtgacctcgagaagtgggctacccagcttcttccttcccgtcaattcggttacgttgtcctgaccacctccgccggtatcatggaccacgaggaggctcgccgcaagcacgttgctggcaagctccttggcttcttctactagatggagtcgttctaaaaaagaattgagaaaaagttcttgctttgactggtttcgcatggcgttggttttattgggctggaccctggaatgtaatctggaatttgtagctgtgaacaaaataccccatgttccgcactttcgatggtttgcatagtacacggttcgctcgtatcaatgctagatgattctggtctgcaattttgtacttctttttcctgattttatcgtagcctggctcggaccgaggtgtactttcaccgccctcgtgtaagtgtattctgcctttcccccgcaacaacaatatcagtactgtacatagttgaacaacccaagaattctttcgccatgcctttggacacgatatatctgacccgtcatggagtatgtctgcatacaatcatcactgcgggcttatagacctaactatggcagcaccgcctcagctggaccattgacttccgtacaggcacatacagggcccaattccccacgccgacaggaaacccagcagaccctgcattgacctcacacggcgtgcgccagtcacacgagctggcggaacatatttctgcaccccaattccacccgaaaccattccgtatctactcgagtcccttctaccgctgccttcaaacaatccagccttctgttgaagagctgaagagaatatcagccgagtctggaaggagccagcaagatggcgagattgggtcaattgatcggcatgcggagcttgacgtacgaattgagaatgggttagggtaagtaatatacctataccttctttatacttatacttccatccaatcactcaactatttccctctcgtccgaacaaaagaagcactttaccagcacattgctatccaggaagctaataagaattcagagaatggttcggcgcaacagatttcttcgaccacccgtcccacccaacctccgagataatgtccacccacttcccaaccctcattccagaagctagtcaaacctacataccactactcatcccttcaagacgtggcgagacaatcaaacagctccacaaccgcctagcaacagccctagaaggtataatcgccgacatcgacgcagaagtctccgctgtggaagcagagctgccaccaaaccaaagaaccagcaaggccgtcctgatctgcgcgcatgccgcgccgctcattgccatgggccgggttcttacgggtcgcatgccggatgatagctctgaagaggactttaatgtcttcacagctggtttaagtacctttaaaaggaggggggcttcttctactgctagtgctggacacggcggtgataaggaagaaagttcgagtgagaagccgcttgccgagggcacgacgttcattcgtgcgtcggtatccccgccgcagtggagaaatgggcgtggtgttggtggaggatgggattgtgttgctaatggggattgtagctttttgagtaatggtgctgaacgtggatggtgagtcgatttcttccttcccttcctttggtattgagagacaatattaatagaccccggcaggcactttgatggcgaagaatcttttaatacgggtcctatggctctgccttccgatctacctgtgaatgtaggtgccacgaaactgtgagtgaaggatttgcgcaactatactgtgcccgtgggtttggcgaacataacgatgaggtcattgcatcttggatcatcaagtactataatatatatatgactccgaacaatgactacaaaccggcaatttgagctgtcatgatctatcactagtgtaagagaaatacatatcaaacttagagatgaaactaagacttcttgctaaccgcttacgactatttacgatgtacgatgtaagagcatctagctcaaaacgacatggacaactgacttgaaaaagaccaattctgactaccttacgtacttgatttcgtggctggcattcttgtgggtatcactttggccctcgtcgagttcaatcgcaaaaactacattgaagacgctatcgctaataaacgagaatataaaaagtacctccaggtatagatcagttcccttgttcagactgtgcatgcgtattcgagaccccctcatgttcagtacctgcactctccgcaccctctggcacaccaggttgagcccgttcctgttcctggccctcctgctcacgtacctgctcctgctcctgctcctgctcctgacgttcccgcgcctgacgctcctgttcagccaagaaagcttggtccgccgcagtgcgagcctggacatgccgctcaccaagaccgggaactagactcgcaaaaagaaaaacaagagctcgctccgcgcggcatatttggtcccaaatgctgaactccgcagcagcgttattggctccattctgggtggctcgatctgccgggccacctgcatgggtgaggccctcgagatgtcgttggatgggaccaataatcgtagtcgcaaactgccgcgggatactggtctcggaaaagaatgttaccaacagggcaatgctgacgaaaatgtaacgcctccaggtgccgggcgcgctggtgaggtagcagaagagccacagacgggtgaacagccagatgcggcggatatgtcgcgccagaccggcgtgctcgacgttgttgcctcggcgctgctggttgagcattgcttggcggatggcattctggaccactgctgcgttttgattgggtgcttgaggtgcctggggtgcgttgggtacttgaggcgcgccggtttggttagcaggggctgtattgggcgagcccgcctgctgcgttctggggcgggctacacagtttggtctcacgagaaggttttctcccgttggcgaggtcagcatgaagagctgagtggagtttggcgcgagggtgttcaagacatttgtttgggtagcaataggggcctgggctagaatgcttgcctgcgaatgctgttgctgcatatattccattatacgggcgcgttgttgaacatcaagaatacgggcaagtagttctgcaacaccgggcagaggaagctgtgtcgcaggccgtgcatcttggattccaagaatctggttccgtatatgaatgatactctccatggatggcatgagacgtcggtccaattgtccctcaatctcctcgatgtaacgtcgtaaagtgagaatacgctgagatgattctgtactatcagcttctggtgcgtttgtagttgctgagtgtcggttaggcaaagaggtattgacgtattgattgattatcatgtgcggagaagctgaagcggcaccgattgttctaggaatgctagagtatgaggacacactggctgcaggcaccgaagtatcgggattggagtgatccaaccatgtggaggaggaaccggaatcttgggcagaatttccgaaaggcgaatcttgcggcatctcagagacaataggtacttctgtgtgtgctggttcaggtggtaggacgaggtgcatactatcagtgccttcctgcaaaataaataccgttcagttaggataggccatatggcgcgggttagaaacgagttacttacctcgatagatgagaccactaccccgagtgttgcgtcatcgacagttagaggcttccctcggtagatgagcctctggtgtgatacttgagggttgttcggaaaagactgttcgatccggctcttgagctgtccgactgtggaggagagtggaacgttctcgagtgtgaaccggcttggagggggtagagactggcagagtatgtgaagcgtgattgttctgggtgtttctccctctactataggctgggatggtagtcctgtcgccattgcttcagatctgtggttgttcgcaagctaaaaaaagccaatataaagcggatctagttgctgatatctggcatcaattgatagtccacgggtgttttctgcgagactctatagcagataggaaggacgtgggaagaacgatgcaagatgataaagatgcaaagatcaagttgcaggaacgctcatttatactgaaatgtatttggatatacagagcagagagaaagacagtctgttgcatttccacgtgcgattctgccgggcggtcaaccggtaacaacatgttttccccatttcggaaaaaagcacgctctgggcttaggggtcgattttagcgctccaggccgatggattaaaagttatggccaagcgcctctttacttcttcacctctccttcattgcccttccgctggccctcggatcggggctgcgtcgatggaggttctttcatttcgggctacggcccgccataaagccagcctccgacatttttcgtctaaatcatggagacaataccagaaggataataactccgaaaacaatagaggaggatttggttcaaggctagggtttgctctgcgcaataccaaggtcgaatggtatcccatcccagtcggactcggaatcggtttactagggttgctgtcgttctacaagtcacaacgtgcggagcgggatcggttggctcgtgatgcagccggcgatgaatgggaagaaggaaaacggccacctcgtcgtccgaggatcagtctgtcaggaccatggcatattcagatcatgtccactctgcccctgaaggctatgtcgcgtctatggggtcggttcaacgaaatcgaacttccttactacctccgcgttcctggattcaagctttactcctgggcctttggcgtcaaccttgatgaggtcgccgaacccgacctgcacacctacccgaatctggcggcattcttctaccgtaagctgaagcctggcgttcgaccattggaccccgaccctcgtgcactcctggcgccctccgacggccgaatcttacaatttggaatgatcgaacggggcgaggttgaacaagtcaagggaatgacatacagcctggatgcccttctaggagcagccacgcctgcgaacgccgaccacagcaaccgactcacggaccaggacctgaacgaagaccaaaaggatgttgagaacatggatgcgcatgaggagtttgcgcgcatgaatgggatttcctacactctcccgagtttcctttcgggagactctgatgctcccaaaggacgtgcttcattggatgcttcaaccgcatccaaagcaacctcggaaatgcttgtgcaagaggacctggccctcggcgatggaataccatggtacgcgcccaaagcagcagccaaccatgccttgttctacgttgtgatctacctagcacccggtgactaccaccgtttccactcccccgctccctgggtggtcgagagccgccgccactttgctggcgagttgtactcggtttcgccctatctgcagaagcacctacccggtctattcactctcaacgagcgagttgcactcctcggccgatggcgctggggattcttcagttacactccggtcggagctactaatgtaggctccataaaaatcaactttgactcggagctgcgcacaaacagcctgttgactgataccgctgcagacttggcagcagccctggctgccaagcgcggtgagcaatatcccggcttcgtggaggcgacttatcgccacgccagccgcacacttaacggacatccactgcaacgtggagaggagatgggcgggttccaactcggcagttctattgtacttgtgtttgaagctccgcttggaactcacaagtccactgatgccggccggccggaaggtgcccccagtgatgggtggacctggagtattgagaagggccaacgcatcaagataggcgagaaattgggctttgtcggtgaggcgtaacgtacatgatgttgcacagcccggtgcacagccgacagcagtaggttattgcctcttgacctacatgtttgtctgtcttgtattataccagtccttctctctatgttaggatcttgatcatttagtttaatcacattttttcccccttcgatctatgtcagctcaagtgtatcagcgtgcatatttcctaatgtatcagcacaggccaggtcgtggcgtgatggtcccaaatgcgtcattgccgatcccaggctctagcgtgttgcacaagtaagaaactatgtaggctatgtagtaatgttgagggtaaagctcgggatgcgatcggcttcttgagcattcgactcgattgaaacttatgctaagtttcttaactagtatgccatgccattgatagtcttctcgggtttctagatagacggcggaaaaaggctcaacttgtgtagacgacttctctttgtataactttcgactattatatagttactgtaaggttattactagcagttaagttaggagaacgtgcattgagcgtggttgggttggaggaggatcattggtgcttctgtcgacaacactgcggccccttgctgtggcatagtggtccatcgggcccattgcatcttaggatctagaagcaatctttgcacccacgccctttttaacgtggtgatggacatttttattcgtggccttgaccttctcggccttgtcgatcgcacctagacacgttctgccaaatcttgcaatacatacatactagcatcggggatgtcaatacgaaatccgtctccttatcctggtatatccaataggatattcacggaatgctagcgccgtatctccctctcttaaaaaaaactctttaagccactcgaggtggagattgagttgactagcgaatactctattagagatataagagaaaagtgagagtgagagaagaattacaacagaaaatcgataaaaaaaagaagagatatgctctcatttcactcttcattctcactttcacttgaggtgagaaaattcacgtcgctttgcctttctattgtctggtttcggggggttgacgttgattggttgtgcatcagaatatggagacggctatcccgtgtgcgttgagttgtccatccatcgagcactggcttcggtggtcgccccctcaatcagggcgagggctccgacccaaagtcacagagcgatgctcctgggagatcaaagcctccgattgaagtgtgctgccttttggtcggaggttctcctaagcttgggcgaagggggaaattcaccactacctgagcttggattatcatgtgccagcatgtttgcaatttcttgccagccgaacacatctggggcaatctcatctctcattgccgcttaagcttcgtggcacgagatgagccccacgactaacaattagtcgagttccagcatagtttaaacgccattccaccatgacaaaaccagatgcctgctaatatatatgcatgaaactaacccatgttataaacggaaaggccgatctgtgagatccagcgcttgaacatgactcttccgagtggcgtcgtcagtccatctgccgccatttcggcagtagggatcttcatgaacttcaccgagccctctaagcccgtgaaaacggattgcaatgtttcgtatttgcatggaactcagggtttgaagcaagcgcaattgctcattgttgtcggcgtaaattggagttggtttcaccaggaagctgtcgataccaatttcagaaagtagctgtgatagccagattgcttcctgaactgctagtacttctgcgatgtattcactttctgtagtagacaacgctacacagggttgctttttcgatgtccacaagattagaccaacctccattttgaacgcaactcaagaaaatgatacttggccacatgtctcttaaaactggaggcgttaaagccctgccccagagccttcttgtctctctgctgtttaaccgtagcattttcaaggaccaatttccctcaaagtcaaggaagttaaggcgaaactccgagccatcactgaggtatccccaaatggaccaatttgactggccacgggccttttgaaatgatcttcaacaccgtcagtggtatggcatgccatgggctcaacaagaacctcatttctgctttttggcatctttgaatccatatgttcccctggagaaggagggtgttgagtatagattcgggcgttggataacgaatatggaccatataacgggagtttcgaagatcaactctgttcaaaacggaatctagacactacttttgatcagtacctgctttctatcaacccgaagaggacagtgtaatcggcggttccaatgcatgtgtactgaactccataaatggagtctcaggtgagagagtggctctgctgtgtccggtgcttggaagtatggaaggagttagcccaaaaaggactagttgactaagccgaagtttatttcaaggtttcctcccttggtgacgtatgctgtgcgcacgtgataatgcaatgactcagctttggcaaaaaggcccggagcttggatcgtccattttcggctgattgactgtcaatcagtgttgtggcgtagtcaagtaatagaatccaagaaccttggaatagctgagtttcagctgcaagtatttttgccattaatatctcatacgtcgcttaatccaatgaacacagggaagagataagaccagaactatcaacgtaggaccgccaagcttccatatctaaatcaacaattccaaccttctctccttctaactttttcacctgttcctgttcccatccacaatcttttcttgactgatggccatctttaactcgcctcgatcatttcagaatgtcaatgctattgcccaggccccaatgggcatggaccgcttcttcataggcgctcatgaaagccatcccccattctttcacctagtgctactcgtcttttcagcagtactggaagtcgtctgtgtcagcttccctggttatattgccgcccgtcagggcatatttgatgccgaagctcagaagctggtggcaaacctcaatgtcgttctgttcaccccctgccttagtatggattcttgctttcgccacatatttctatgacatagctgattgtggtcaacagtttttaccaaattgggctcacaattaaccgctgaaaagcttacggacttggctatcattccggtcatttttattgtccagactttcgtctcatacttctgttccttcattgtcgcaaaatgttgccgcttcaagaagcgacagtcaaatttcgtggctgccatggcggtacctaatgggcccttccattgagacagtcgaatatcttgttctaacgataccttctcgcaggtatttggcaattcaaactctcttcccatctcgctcgtcatatcgctctcgcagaccctcaaaggcctccactgggaccagctccccaacgacaacgatgacgaagtcgccgcacgcggtattctatacctgcttatcttccagcagcttggtcaactcgtacgctggagctggggataccacattctcttagcgcctaagcaccgatacctcgaggaggtggaacgcgacgagactggtcagtcaattatcgagcagggtcaggcgctgtatagcgacaacccggaccaaaccgatccggacgaaccgctagtcagaacacggagctcggaggatctacaccatgttcacgacgcgacaaacaccgaccgtccgttcccatccggcgaccaaacacccgtgtcaacgcgaacttattcctactcgaagatgtcccccgccccctcagacgacctggactcagacgacacaccgtcagtaattggaccaccacccaccggccccttcctcccccgccaaagctctcaaggtgacattctccacttcccggatgtcgaagtcaccgcgcgcgaagttcaagaagccgagaaaacgtgtttccagcgctgcaaagcatctctgcgtaaatctggacaacgcttgagccagtggcgagaaaagaaagctactgccctccacgcaagcctcccaccaaacgtccaaaagggcatcgcagcaaccactcgcggagcgcgccgcttcctcaatggcttatgggatttcatgaacccaccgctgtgggcaatgctagtatcaatcatcattgcctccgtcccaacgcttcagcgcctcttctttgacgacggcaccttccttcgtaactcagtcacccgggcaattgagcagaatggacaggttgccgtgccgctgatcctggtcgtgcttggcgcgaacctcgcgcgcaatacaatccccgaagaagcgctggcggacgtggaacatccccgcgacgaacgcaagcttatcatcgcttcacttgttgcgcgcatgcttcttccgactctgatcatggctccaattttggcactcatggctaagtttgtgccgatcagtattctcgacgatccgattttcattatcgtctgcttcctactgacgggtgcgccgtcagcattgcagttggcgcagatctgtcagatcaataatgtttatgttggcgctatgtctaaactcttgttccagagctatgttgtctggtatgttcttatccctcctatctatagacagacaccgtctggttgtcaatctcaattgatcattgctaacatggcttttcttccaggatcctcccctcgaccctcgtacttgtcatgtgcgctctggaggtcgtcgagtgggccgccgcttcatagactcttgtttgacgtctgaaccggaacggtgaagctggtctttccttctctagtccttttttcggggtttatattcattctctgtggacattcttataaccccattcctttttctcttttggggaattggcgttacctaaggcattattcctggcacacaaactgtacttatgaattccagtactttgaccttgctataactaacgtaatcggtaagcgaggcggccatgtaagcacgtcggccacgcaacccaacccattaatttcaaatacatttatctcaactgaaacgcccattgcttccatctgttcctaactcaacgatcctcataccatttccttggggatatatatctacccaaacagtctacacgcccaagtctgcccttattgatagcatgcgtgaaatcattatcgagtctgactgagaatatcatgaaagccctcactagctgggttcccatcagagacaccgaaaggttcatgcgtgtcgctaaagcggaatggaaagtccatcgtcgcaggaaatccccttttattctttctcgagttaaggcttcgctcgcgcgtttgtcttcgaccttatttggctattttcttcacggccaaccccactttgcactaattcgccctatgggtgtgtataccctaatgattgcaatcgaagcctagtcgtcatgcaccttgaccacgaccttgccacgcgcacgctttgtagcgatgcgctcgtaggcacctatggcatcctccatgtcgaagacagagtccacagggatacgcaagcggccctcctcgatcagacgtgctaagtagactgcatcgtcacatgtcggaggcgtgctgaacgttatatagcgacgcggcacgccgcctagccaggtgggcagccaggtgttaagcaaggcattgcgcgccatcgcatacatgccctcgaacgcgccgatatttacaacagctccctcgggctttagataagccggggagccgacaaaaagtgcttgcgtgccaacgcaatcaagcagaaagtcaaacggcttgtcgccatactgctgcgctaggtaggctggcagagattcatgctcgcggtagtcgacgaactatttgtatgttagtcacgactcatttttttatgcaacgttggataactgtgcctacctcatctgcacccagaccacgaaccatgggctcgttacctccgctagccacgccgaccaccttcgcaccacgcaccttgcacagctgcacaagcaccgaaccgactgacccgctagctccgttcacaagtaccgtgtgaccctcgcggacacccgctgtgcgaatcatcttgagcgcggtgctaccggccccgataatacccgaggccgatgccatgccaataccgccatcgatccgtgcgacctggctgccaggcagtcgcacatactctgccagcacgccgtggcccatgatcacagcgctgggaatgttctgaaaggcaatgacgtgtgagcccggatcgcgcatctctgtcggtgcacccccgccagccgctactaccacgccggaaaactcaatctccgggatccacggactggtgaaaggcagtataggcagtatcttcattatcgcctcactgctgaactgtagggacacgtgtgacacgcgaattaatacatcgggcgacgagcctgtgggcacttcgggggttggatagtcagtgaccagctcgagcgcgtcactagcaggaccgcgtcgccggcgtacccaggcacgcatggttggcgggacggtcgggagctgggtcgacgacattccttctgccattggtgcgtaggaatagatggagaagaggatgattatgatagaagcagacagaaatgctgtcgacagatccgaaagccgctgtgagaaggattgggcaattcaaggagaacaagtgactgtcgagcctctttgaggtagactgatggcacagcccgagaatgtgagaaaggtaggggttcctggaggttcgccgtacgcgtcataataaatgattggtaagaaaaagcgtgtaactaagccttaactaggtgtatcgcaatgactttgtctaatgccaccccgtttactccgtagtcaaggacttccaatgttgacggtatacgcctaggaaggccttcgatatgtgcgcttatcagaaagaaagaaagaatccatcagtcttagtttagggaatataaattccttcagtttatctccagggcaagagtgtaggtgtccatcctaagaacaaagaagtgggcgtgctcaggtgtactcaagcaaaaagcggcaaggcatgagcactaatgcggaaagagggagctatacacctgtaggtataacgtttgataaatcaatagttctagttggtttaatatcatgtcactctgctctagaactgtagcttcaatagcaagcaaataccaaggcaacagtaagaaagtcagtgaccggattattgcacattcttaaaacaacgttcaatgatgtggtcagctccgacacagaaagaccagtctaagaagtgaccggatgctggtgcaaaatggaagaacccaatcacatttccatccttaacccagattgcagatccgcaaacactatcttggagactttcggtggacccttgacccatatagcaccagcgagtcttgatccattcgaatgaaggttggctagggtcagtacagggaatttgctcacgggtgtgaggtccacagataccttcggaataaccaataagatggttattcatatagaccgtatcaccaggcttcaagctgtcagctgtgacgagacttcgtaactgggtaggttgtattccgttaaaagggctctcgaaagtgtcatttacatacgggacatcatcatgcaattttgctatcgcgatttctgtatgtgtgatcttcataatgatttgaccgatctctttaccgctagcacatggatggaaaacttcgccgccatgtggaaacccatgggaagcaacagtggtataccgctcgccggagttagagttctcaacaagtacaccagaagtagtaagatacccaggttcggtgggagaatatatactagagttcaacataacgccgggacgcagtatatcatacttgctactatcaacaatatcggcagtcggttctgtgagcctgccttgtgtcggtcgtcgtacctccttatcaaacagataaaaacaggtacagcagcctatcgaacggggtacttcagtaaaatcagtatcctcatcctccagtacaatcataaacaaattgccccagtactggacttgggtaatagagatttgagcttccataaagaaatcgaagacgagcttgaatgcattgtcaacttgagagggtggaaggtcggtaacgttgatttcagcgtctacaaaaagacgcgatttgctcgtacgtttcattgatggcattggaccctcatcattcgggtccgttgtgaaatatggccggactcaagcaatggttagcggccacggctttgggggcagagagcccagcaaaaacaccaagaaatagctatcaaatagaatccgcttcgtgtcaggaaacagttgcataagctgagcagaatcgcggtggaaagttcgtttttcacgcaggttgaagggtagaatcacatgtctagatggtggaatcagcttccttagcatttcggtcgtcattttagaggaataggatcacaactgaagatgaggtgattatgtttgagagatgccgttggtcacgacaaagcccagctcctcgccgataaccaggttgactcgtgcgttcgggtcattaggtctagtgttgtctcaactggttgtccaacttggctccgatcgcctatcttttctcagctggcactccggcagacccagcaaaacgacagatgaaatctgcaatggtgagagataaagagtaaccttccgttctcaatggggtaatgtgagagcgacgtcaagtgctgaacaaagatccgctttttatagtaacagatcaggtaatctatactgttttacagtctagttttcaaatacgcttggcggtcaatgattccattagatcctaggagtttctacttatcagtataaaagactatgttgtacttcatcaataactgcttcaaaaactggtcctttggaatggcccttaaatgttcgcagctccgcgccggtctgggcaccccagaccgtgatggttatatttatattttgcttgacgagagctcatctcagtttctaaaggcttccatgatgctatggctacaactgcatatagcatgtcgaaccatccctcgacttctcttacattactctcacttatgaataccccaccttcgactccagacgccgttgactatataaaccaccagagaccctccccacattttcttcttcgccattcacccatctccactggagatttccttcatccatcttcccatattggatatggtgatctcagcaattccacgagaacaagaaccaacaagtgagcggaagcctgactgagagaactagacaagccaactttggcgatgtctcttcttcagcaaccgcaacggacgagagagtctacgcatctagcggaatgacaattgcaaacgatgacagcgatgaagaaagaagatttgctggattagcgactccctctcaaacgaaccaacacgtcgacttcgcatactggaggataggatatgcggactatactggttgggcgtgggcttgaccttttgctggtcgggcataggctcaacgtgttgttcgtcaggtacagactcaaggtattgggtgcccggaaggcggacaccgatgtgggtccagatcagtagataattccgctcccctcctcttctctcttttctcctctcgtgcacttcatcttagtcgaatcgatactggttgttttgctcatagcagacacaacgtagatagatcgccattacaaggtgctgctcatcaggcacggattcaacatcctccttgttaggcacggacttagcgtcctcccctcggctactgcttattggcaagcgcttgagtcatgccacaagacttccctgatgcgcgcattagaaagattgatcaaggatttacatgtcttcctatccgcatctaggattggcctcccggaatacttgactggacgtatttgcggcggaaagagctgttggtgcaaatatgccatgacgaacctgagtccagggttatggatatagcccatgtatatccagtagctggtagctacaaaacgccaatgtctgtcccatgtctgttccctcccctcgccgtattgcgcgaggttgagtctgtgtatgacgagcaggacgttgagtctatgcctgacaagccatagagatatcattctaccaatccaaaggccgaaagagcaactgcgaatacgaacccgtcaacaaattcaatacttttgctattttaggtatagtttaagtcaactgtaattgatgatgtttccccatgattcatgattacatacagcactgctagaacaagcttctaacaaagatcacggtgaaggctgaaaggtattcaagttgtagcaacgcttggctagaaagaaatgagatcgacggaagagcagcggttcctttcgcaacagttccaggttgattgaatccagaatcattactaaaaggctagtttaggattgacctagagttctaaggcacaccgcatcccgttaagcgtcgaaccgggtcatttaatgtaccgtggaccatgctgcagcttttagtgcagaagcggaacccgtagacatgaaacgaacttcatgaagaaacgttcatattgcagacaacgggaatgcggatatatcgtatagaagtctttataagtagtggcactttgcgcctaggactcagattggttcgagtaccgatcgaccaattttgtaggggtgttgttgatcttccatggggcttccccaggttctctctctggtcgtatttgcataagggaatacctgcaaatccacgtcagcagagtcaatatgagcagattctccctcaaacttactccgcgaaaaatgtaaacgtctacatcatcatttccgatcgtcctggccgcccgagattggccctcttcaccgatgaaccgaggaatctgctaacccgcagaatcttcctcgaggaccgtatcaactcaggaattcatttccatctttgctagtcggcacgttctgaaccacgggaccgagacgtcctcatgccactcccgagtgaatggtcaatttgaatgcaagactcttgctgcgcaggaatgtgtaaaatccaatcgaacatccaaaacagatgagcaactagggtctggagtgtatgtgttcacaaggctaatcccaagccaaagctaatcaactcctctcaaacaggacatgattctccgctgctagcgtgcgcagccaatcccgccggatcgccctgcacatcaatgaacatggccataccagtcatcgaatgccaaagcatatggcaatgcaaaagccaaacgccggggttatctgcccggaaacggagaacagcatagcctcgactagggatcacgactgtgtcacgcaaagcagcccgcgatgtgtcgtatagagcggaatcataattaatgttagggtcctggacgtcatctgtgtcatttttcaacgcatccgagtcgggttcttggtgtggtgggattttgtcgaggaagggattgtaggagccccagccaaattcggattggtagactgcgagtacgtagaagtggtgcccgtgcttagtggaaattagtgaattgtcgtcactggataagggagggaagggttcgtaccatgtggaaggggtgggatccttcatctaaattgttgattaccaggtctacccatacaggttccggccccgtggttattgagaattgatttgcgtcccatttggctcgtggcatagacgccagtggaatgggtggatcttgctggggcttccaggtggtttggttgaagtaaccaaatggcttgttggaatatcgggccattttctggatcttggtgtacaccacgtgcgtttgttgagcggcgggcgggatggaatggagaacggagggcgcagaaggtacttctgcgatgtcgagacggtgggccttgattggaggcccctggacggcatcgggacggtagttgatggggaaagtttgatctggcgtcaatgctgggttggcgtacttgaaggaactggtgaaacattagcaactagtaactgctatgctcggcgagtttgtcatactcttcatctaactgaactgtcatgtgtgactgcttttcagatgtttgtgataatggccgaaggacaaagtctatgcgttgcccgggaaagagtgtaccgatggaatttatatgcttctgtttggagcgggccacatcgatgctatccacctgaagcaggtccagaagatggttgtcgaaaacgagattcagcccggctagagatctgtcaactagttagcgaataactaatttggctttgatgtcctgtgacatacccagtgttgaccacgcgaattcggtatgtcgcatgaggatcgaggtcgatgaatgcattattcatctgctgatcaatgcagtccaccggtctagcaggcaccgccatcatgcagttaaaataccctgccccattgatgagcatggaatcaggaacaggctaataccattgtcagatagacttctccaccatttgggaccatatcggaacttacctcgcttccaaaattcccagggtccatataccattctagaacatcacgcgcaggacgatggtaccagtccccgatgagaagcaaaagttctctatcataattgtaacggtgcagaccactgcgcccacgggatgctaagccccgaacggtggatttggaggctggtgcatgcacgaccagcccaccataaaggccatccgcccgcgagacccctgaatgggcatgataccagaaagtaccactctgatcggatggaattgtcaaattatacacaaagctacttccagaagtcacggggcattgggtaaccccggctgcaccatccatggcatctatgtgagttagcgccgatgcttccaaggtttaaatcgcgaaagacaaagcttactagccacatgaagaccatgccagtgaatcgcaatcaactcatccggcaaggcattggtaacagtgatgatcaatgtgtcaccagagcgggcctctatcgtcggtccagggaataggtctagtttgatatcctccggtcagatccaccacggtgataccaggttctgctactccgtactgaccgttgattaaatagacccgcttcaatacaccgtctggtcggcgcaagcccgaggtcacatgccaatccaagtattgagtctccggcgcccgatacgcatgatcctccgggtgaagctctatgcgcggtcgagcagtgaaagcctcatcttgaatgttttgaaggtggccgggtaaaatcaaaggcacaagaaagatgggcgattgcaaaaagtataccaagccgatcaagaaacacgcaaccaatgagcagcctgcgatcggccatggccgctgcgatggctccggcattggttgggccaatttctctggactaggggctgttttcccagccggactgtactgtttctgcattgtttgtaaagaactgggagtatcgcccaaattaccgttatatagttagaaagaaggtcaagtacggaggggaaagaacatcccgctaggacctcaggccacccttactgccggggatcaacgtgatgcgaccttacagcgagacctgcaagacacgtgcccggctggatcaatcacagcgaagggaaaataattaattgaaaagtaatttcctagggcatcgacgccataaataagggaataagacatgtactaaagggtgggtggcaccctggactaggcccaaagggtacaagatcgttcctgccgaaagtgtgttttgggttagcgttgggtcgaaccatggaacagcattcacgtggagacagctgcatatcagattggatcagcaaggcacatgtaccttttcgtccatcactcgactaacaacatgttgtatacgcatatgagtgtattattgtttatgcatgatcggcatgcttcactcaaatgccagcccatccctgtattcaaattcctcaattccgattcgttccttcctcgaacggtctgccatgaagaaaccgcgatgtaaccaaagcgtgtgggggcatcaatatgtacatacactatacacatgaaacggtacttcgcgaatctctccgctatctgcagcgtcgggggcacataagtagcgcactcttctcgcaggttaactcttccccttcattccttctgcaattaccgcatcatggctttcaaattgccggcgtctatcgcggtcgcgatagccctgggaacgggactcgtgtctggtggatctctaaaagacattgaacatgtcgtcatcttcatgcaggagaatcgctcgtgggacacggcacgttttgcctgcactatgaaacattgacatcgtgctcaccaaatcgcagtatttcggcactatgcctggagtccggggattcaatgatcccaatgtccaggtcaacccagacggaaactcggtctggaatcagtaagtgccgcctctaagggagaagttagttctaacattcctggtcagattagtcgagccggcccaatcaaacaagaccaagaccttgctaccctggtatcttggatatcaaggcggcgactggaatgatgcaattcagtgcatgtctgcgggtagcaacagctacgaggagaaccagcaatctctcaactatgggttgaacaatcactgggtgacaaacaacacaccctggagctgggggtatttgaagcggcaagatattccagttcaatttgctattgctgaaggttggacatcgggagatatgtatcaggtgcgtggcaagactcgttttcagaaattggtgactaatttacaagcaggaaagccaaatcactgccacaaatcctaatcgggttactttggtcagcggctccatcaacgttcctggtagtccccagagcaaggaccagggaggtgtttatattgacaacaatgaagtaccaggtatgtatcgtcggctctctcttctgttaatatttttgatctaaccaaattataggctgtgatgacaacggtatcaactgctacccactcaagtggaagacagtctatgacttttatgaagaggcgggagtctcttggcaactctaccaagacacaaacaactttgacgacaaccctctggcttggttcgaccaatttcaaactgccccgcaaaacagttctctggctaaaaagggtatgtcgttcgttggccttgattccttctaccaagctgccgccaacggcacattacccgaggttagtttcattgtcgggccggcggagctgtcagagcacccgccgtacatgccaaaggacggaggctggcttcagaagaaggtcgtcgatgccgtcaccagtagcccgaagtacaactcgacccttctgatgatcagctatgatgagactggtggctttggcgaccatgtcacccccttccattctcctaaggataccccgggagaatggatgcaggaccccttgggtatgttcacggatatcttcacaggacctggttttcgagtaccattctatatgatctccccctggactcgcggaaaccgtgtgttcactgagcgggcagatcacaactcccagattctctttgttgaggaatggttgactgcacggggatacgaaaatatcacaaccgatcagatggttgaatggagacgcaagcacatgtctaatctagtcaacgcgcttgatttgcacaatccagactactctctccccagtctccctgatgccgggaccgtggataccaacgccaagggcgagtataccggtacatctaactgccaggcacgttacaagcagacacgtccggatgttccctatggagaacagagcaacgcaacggatgtcaataccctgtggtttgaagaaggtttcaaagaggtggttggctacctcaccgagggccgatacctaacctttgagaagaatggagcagccctcacgaatccgaccagaggcaacagccttgtgtccagctctgcaagccctcagcacaacaataaagcgcagcgttgggtgatccactacaacaatgacgaggaaagccagacatttaccgtctccagcgcactggatggtcgatgggtcggccccgatggtgttctgcttcccaaaagccacagcgcaaaggcagcccaagtgcatttcaccttcctaggtggtggccttggctataccatgcagtttgtggagaaggggcaatacatcgatattgacaagcacggacacttggatactgaaagccgcaaggctagacctgctagtggctaccaggtcttcagcgtctctttccgtaattagatgattgtgatgtgatgacgatacggaatcttgcatgtgcatcccgagctgggaacgaaattatttatagtatcttctcatcaggcaaaagcctgaaacccaactaaatatacatattttccaataatctcctgtccacaccgcctctccaatcaagttctaaaccgagccgaagtattccataatctatgcagagataaccgtgaaaggcccagcagcgttgaacaaggtaggcatctgtataaaatcaattagcccctggagataaaccaaaaaaaaaagcaaaaaaagaaagaaaacatacctgcggcgcagtcggaagcgaagtcccaattctcaagtaccaaagcgaggcatcctcgacggcgggcaagttcttgggaatagtaacatccacaacaccggcagtctcattaataccgctcgcgatccggatagactggttgaaggagatggtgtcgaggtggcgcacggggttattgtacagccagacgttgtaggcgtcgccggggtactgagtcaacgggtccgggcagcggccggtgggcttgcggttgaagcggacgcgcacggtttggccggcggtgacggttgagttgtcggggatgccttggtagacgtttacgcaggcgtagtcgcgtttaccccaggctattgttgaggaattgttagtttaaacgttgagtatagagtcggaattgggattggaggtgcatacgctggtccttggtgaacaaggcggtgctggttcccgccagggcagcgatgattgcggcagtgaacttcatcttgggatttgagttggtggtttggtgattgatggtagaagagagagaattgtatggaaatatattcaaggtgagtcctgagaatcggcacttatataggaaataaatattttgcctgcaatatcgtgccaccgacgacataatacctgctaattatggattcgggttcggaaagccctgtctgcgaggtctgagtgatcatgtttcactcagtctctccacatcgactcgaattagaatcccgactgcttggcgtgaggagtgatcggcgtagccgatctccgtccggggaggagagtcgcaaaagtctcgtatatggtaccgagtatagtggcgtgcagttctgtgttgagcctctttcatgaatatactaggatgttggtttatttgcctaagggatgttcgttctctgcaattgtcccttgctttgtggtcacgagacaacatctgtctacagattttcagaatacattaactactagttattgagtgtttaatccacaccgtctatacggagtagctctttagatgtctcagggaaaaaagcccctataatgacgatgcggataatagtcgcctaacagccttgactattggtttgccttttcagcccaacgggtctgtttctccgcttgaatgacatctgacatctgggcagtagcccttggctgcagtaaatgtctcagaagatgcccagctgtcgctcttcataagaattatggatattgccaaagagcgcgttctgctaaatatgaggtagttaacggactatcgctcttactgcctgccgcttgctcctaggaatacgacttcagctctagcggtagacatccacaaaaatattctagacccatcgatcatgcctactggatgatctagcagcccataataaaatttgcaacccctcatttgcctaccatattctaactagcaatcagaaaatacctcattctagctaaagtctgataggacttcctaggagttctcagacatttcgtgccaccacaatgtgattggtgagatgatatagatcctaggagcttaagtgctggtacccactcgcaagagctatgagtgctaacgttgagagtcaaggtatataaaaaaacaaagagggaacccggttagtggttctaggatgcagttgataggattgtcgaaaaatcccaggccacagaggccaaagataagaccagcgaagatctcaagataggatcgtgttagtgatcccagccagcaggcgttgcttgcctgatccggacttgatgatgatgctattcccagatgacctaggagcagcgagatcgatgaaaattgatggaaattgatggagaaaccacagtaatgatgaaactgtgggtggtggcgatgatggatgatcttgaagatgcagatccaaagagaagaagaaaaggtgcagagtggaagcaaactccgcgggttagctattattaggaaatagcaaacaaccacaaaatcgtctgattatggtttaccccccagggtggtatcgcctggcagaaaaatctctgcggcaccttgacagatcgtcgagaagtgatctgaaactattcgcacatcccaaaggggaaattctcgagacttggcgagaagcgaattttccgaggatattgatagatcgtgagatcagaccaataacgaactccccgggctcataacctattaagatctacgagttagtagatgaagctacaatgtgtgttgtatgaagaagtgatggaggaaagggagagaactagtctaccccatggaagcatgtggaagcatgtgacaatgtgccgcgtgagagagttcaacaggcacgcgacactgggcccggatcggatgaggttccatggctcttacaataaggattgctagaaaaggcatagtagttttgattactatggttcgtcctaccctgtcctacctctatcaagtcccaggtctgaatttcttctttcctttctttccttttcacaaacatctctgcctttaacttactctcactcatctttcacctttactcatttctcaattctctagttatttacctctctattatctcaagtttgagccaatctgaggcaaggggacttcttactttttttcactttatactcaaatcgatttctacacatcctctattcggcactcggttaagtcacttgactatggaatcttctcagtctaaccctcctacctcgcccgactctgcaacttcacccggatccccaaaagctccatcgaaaattccaagaaggatcagctccaaaaggattgctcttcccgatttaaaatctgcactggaaagggcggttaaggccagagggaaaacatactcccaaattacggccttcgtttgttattgggacgacgacaacacttgtgctcaagaagatggagaaaccttttcccatatgatggctgatcttttcggagttaccagccaaacatttgtcataaaccacgaagatcccgttccaggctgggatttaggagatcgcctgtatcaagaagttgtgtccaaacaccgcatttgcaaaccaacgctcttcatttttttttacgctggccacggtacgatcaatcaacttaacgaactttcttttaccgcgaccaagaaggaacaatttgttccatggcgcaccatcgatcgtgaattgagttaccacacttatcctatggataccttctgcatcctagattgttgttattccggtactgctattgcgagtaacccgatgacaacccatgtcttagctgcttgtggctcttcggcgtttgcgagatcccgtgtaaatggaatatcctttacacagcgagttgcgtggaccatgcgaaagctttctcactctggcaagatatctatctcgacagatgaaatttttgatacggtacagaatgaaactcctcgtggctgctacatgccaagattttcgagtcataatggggtgaatcccattgtcttacctttccacgtcacgtctacttcaactcctccttcgccaggaatttcgtcttctggtcatacctcaagttcgagcctaggccctgcattacattcccgcccgctatcacaatttccatccggccgcgaaactcacgtccttgttctactcgttctcgaaggaaacccgaagctggttgtccaagactttgaaaaagttgttgaaaacctgccggccaagttcaaagtgaaaatcacagatgcctatgaaaccaatgcatctgcgggagtctttgtgcgcatgacttgggaggcatatgcacgattctcgtcaagcgtagaactagacgcactacttcctgtgatcggaccatcactgattcgcacacatgagctccgcgagatttcggtccgagctggccgagaaaacattccattcagagatcggccccaagacaaggcataaactcccaatgatttcccttttttttcctttccatgtttgtacttttaattttttaattcctagcgccgaattgaagccgcttattctcaaactataagacacaacgatcatcaaggcagtgttttgcctctttataaaaagtagattggccgggagttccagagttacctaggtaccccacactttcttatcaagtctgccccgagataggattgggactagggattagtaagcttttttcaagcctgagcgctcactgagcaatatgtttttacattactagttaagcatatcctaagtgctcacagtgatcacccgtgctgtgaagtactcggtgagtaggagccctcataaaagcggcggcacccctatcgggaaattcgcgaccgtggcctaaaatccggtacaggacatatgtattgcatatgaggcttcataaatttacaagtctgcattctgaccaatatagaacgctgttctattggattctatgttgcaattttcacccgcatcctcattccatccactggcttggaggtgatctccagtgtctgaacttgttagtaacgcatatcacttctcaaggcctagacctgcaggtccgctgagtacttacattgtacagctcggactcgacttcgtattgtccgttttctttttcaattggcgcacctgattcatccctcttggttgacccaagtcctactttctcccaattatatcgccgtgcggcacatgcgagaatcacaagtgcttcgatgttcgccagctcttgtccaatacagttgcggggaccacgctcaaaaggccgccaagcactggccggtatagagcctgtttccaaccagcgttggggaataaactcattgcttttgtcaccgtacacggcttggtcacgctgtataagcttctggcagttgtatagcatcaacccatccagacacttatcttcaccattcggtaatcgaacgctcaatccagtgtttggggtggaaaatcgcgctgtcgcagctggtggatacagacgaagaatttccttgataacggcagaggtgtaggtcattctttggagagcattctctccgtgttctaggatttggtttcgaacgtaagtcgggtgcgaatcagaaccgaatatctcgtccagttctacacaaacacggcgcgaggcatgcggggttcgagctagctcgtagaatgtccattgtaataagatgcttgttgtatcatggccggcaaatagaaaagtcttgagttgatcgcaagtccggtctaacacttcgggcgttaactcgtgcgtttcgactagactgagagcaaggacactgcgagacggattttgtgaagttgactgcccctcaaacttttctttgatacgctctttgatctgcacaccaagttggcgagaaagcaacttcctctggagagggagtaataatttccatccgctgtggccggaacgataggttgagcctagtttgcggaagagtcgaacgatctcactttggttctcttctccgagttgagcgtccagatcaatatccatggtgacggcgccgataatgtcaaatgtcaaattcgtacatagttcatccagtaagaactcctcgtcagtggtcgcataatgatcgagcttcgtcaagaaaagctgtgtcttgtccagaatacatggcagcagagtaacgaggtgcttatgggcaaatcccgggttgaactgtttgcgaaggcttttccactcttcgttctgactccaattagtatagtctagatgtacctcgaccttcaacctacttctgcaagaacaatcgacagtgggcccatcatgtcactataccagcgagatgtgtgtgactttggcggactgtatggaaacagcttggagcttttcgatatttgctctgcaacatcatgatcgcagatcacgcacatgggatggctcactggtcgcaaatcgacaacaaatagcgccggcttgccaagagaatcatacatagctttgagagtttcgtctatcaattacagtcagttttatgttcctttcctaaatgggttttaaccgaccgatgtggatgtttggtcgatttgtcttcatgagtttgtcgagcgtggacaaatgcccccatagtagcgatggcggaagctggggcaaccaggcatattgttccgttcggcaatatgtaatttttctccagagatagaaaagaagaagtggaaggatcgtagcgactaaagtccaggccattgttgacatgaccgaataatcgtgatggaagcccgggcaagatccactcgcttgcattattattgtgctaaatatgcacttggatgacaaagattatgaagactaactcaacttactacaagagtagtcaacctttgtccttgacgataaaggatttatctgcttccagatgatatcacagatgttatatattttcccctatgttatggtatcattgaagatgaaaaacagtgtaagccccacggacgacttgtataagcaggcacatgtgcgaagcactcatagattcattcccttagttcctatttgctcgcgatacaatcaattactatacccttgcacatgcacaggacaaagtaaggggcattttaggcatctatcctgccgtattaggattagtattgttgagggcagaacagatataagaagatgcttttgcgacatgtagttgttgagaccgtttttgcctcaggttgattttgctgagcgaagctcagcaaactattaggacctacactttaccttgtttgatcttccttcttctctcttatactcagcaagcacacaatacaacccacctaggcatggtttcatttcccatcaatgattctcatttatctaactcgagttctcatttccatctttagatttctacattcgaacacatcgaaaatacgtcatccctcggtgcaaacaccaaagcctggagcatggcgaccataggcagcctttccgacatacgaaatgagatcttggggaatgacactgcgaaacgaatcgtgttcaaagtgagaactaagcatctggattctcaagactatcgcgcctcagccaacggagttatcagcgcggtttttcctggctgggaagatgacccgcgggttctgcctgtcgctgttgatgtatggcatagccgcacctacattgtcgtcgacattaaccatcttgactacgacttcaacacggcccacaaaatcaaaaaggtcttcccagtctacatactccgtcatgggaaaaagcgtggttggattcttatcagatggcctcgagaggatgagccccttggtgacaaagtcatgtatcggtacaacgtccatggttgggatgccgaaacgcctctcctagaagaccaccactcaattatcatgcatgccaatccccgcaaccttgatgagcaaccgttataaatgatgtgaagggctaccgagctctctgagttcacatgctcactgctctactgaatttcttggaggccaaatcttggagaaggatgacgagttctgtttcgtctgagaactcccgctggaaataccttgaagataatgggagtcaatatctatttctttccatatcattgttgtcttgatataccaaattatgtagtgtaatgagagaatcccaacatcatgtagctacccggtttcgattccctgaaagcgggatatataacatcaactcagactagggccatagtacggatccttcagtggaggtcgtctccaacgcttctatatcagcgatgatgatactgccgtttggggactagtgtaacagagccatatataacaagggatgggcttgcaacctgcattcatcattcacccacagccttttatccatctcgagttttctaccaaagatttctattttgaacacatccaaataccctcggtgcaaacaccaaatccgtggccatatggtgttcatagccagcatttccgatatacggaaagagatcttcgaaaatgacattacaagacgaattgtgatcagattgaggacccaaaatctggattctgaagattatcgcgtctcagcttagggatttgtcagcgatcctgcactgccctgtttattactctcgcaaaccttgtctcggacagcgctttatcaagcccatcacgggatatccattttcgtttgcgatttggtgagattgctcccagaatcggccgcaaactaaggatttcagccatttcgaagtcaaaaaagactttctggattgtagaactaattccgcggcattgggtccttatggacaacaaaaaggcggtatatctgtgagagcgactctttcatcttggctattaaggagtcttacctcatttccttgagtgccagatcgagaggctgcccacccggactcaacagtatcatatgcttgatatacgataccagcggtcgacgatttgcacctgagatgttgtgcagtagtgacagtgcggaggctggtgaagcgatgcacgcacgactggtgcaccatgcggcggatgagagttgatgaagtgaggaagttgaggacggaggagtattgatgaaagaaggaaaggcagaagggatgaaagaggagtaacaaatagggaggggttaaattgcctagaatcgatcggatcgaatcatgttagaccatgtgtctggaggggaaaagggccagaggattgtggacaaacctgggcgagagtcgacgttcgtgtccctccaatcgtgccttccgtatcctgtggtttgtccattatgaagttggtatttgggctagcctgtcgagctttgagtcgtgttggatatggtgtcgtgaagatattcagatcgttgaccttagaagtcaacctccgagcagcgctgatgtaaggataatgttgacgtcgacagatacatgtagttaggtaactaaactactgcagaatgctgcaagaggatgtcacttatctgataacgtattcttcgtaatttgcccaatattgactcaactcgcagaagaaagaacagatactctttgagaatctctctggtctctgtactgaacttactgagccggagttctatccaagccacccgcttagaaaggaaaaatgccagtattaagtatcaaagataatccaactaaccaattcgatcaatttgtctcattattgctatacaggaagtacagctacgataagagacagtctctgaaggtaagaatccaggaatagccctaggttatagaaagcttatcggaaaaaaagaaaagaaaaacaaagtccaagacgggtcttaaccacgaccgtaaggctatgttacccagtgatggtagcccctgatctacgtaaaagcaaatggggaatgatcttattccctaaaatgtacattggtaaggtgtagcctgtagggaatgcccgccccacacctactctagttgaagaccggtcaggactcagaccatgttcttttactattatacgatagccaagcatttggccagatgaagatagtttgtttaatttcctgcaaggtgtcattgtagctcacttatctgatacgagggtctgtcactattctgtagtgttccgagaacaccctggtgtatagacacaaaagcctgacgatgaccccacggcagcagttcttaatgattgcagcacggttaaaacttttcatttcctctcaccaatcatccgctcgagtcttgcagcaagcgacgctcatattccaagcgtattttgcgggccgacttgatcgtgtggcactcccgcagacacagatagaggtccagaaggtcgacggcagaggacgactttgaataaggatggctttgtaaggtgttccctgattaggaaaatgatccgcggattctgtttcttgctattgacgtatgggataaacgtgtcttcattgtcatcgacatcaatcattgctgtttccaaccggttcccttcagtccggatatcccgagacagatggaaacaggttgtctgcctgattatccaggcaccaaacagtcacctgagcgataagcatccagtttttttcgccgctttttttttatgttgtacatattcccccaccatcagggattagacacggcattttctttcgttctggtctccgttgacgctgtactttttaacattgaattccccaggtttcgtcactttggatctgtggtagcattccagggaccgcatccgattgacttgacgtctccgttcgcttgtccacccgtggttttaaggggtccaattaatttcccccacctctcccctgaaccatttcgactggacacttgtcggctagaatccgatttcgcaactggtcgcgtgcgccaaagataagccattgagcctccgtgtcttggcttacacgtgcacataccattctcaactcacaggtagggctcccgtcccctttctcgcacgttccgtgtgcgactctcgtgtagataaggaatcccaccgtatcgctctgtgttctttcaagtacaccttgcccccttttttgtaattcgactcgactctcgctccagcagcactcgaaccattggccttctttaatcctaaccatactaattcccaacagattcatctacggctcggatatcagtttgaccaaggcttgcacgcaagtggaaccgttgtcggctccccgccagacagaattgccccaaagcccattacgcaactattcaccatgccttctctggatgatctttcgactctcatacttcgcgaggaccaagaacaccccagatccgaggaagattcccagggtctattccagcaagtacacgaatggctgcaccatgagaaagccagacgacagaatcgtaaagcacgcaaagccgaagcaacctcccatgcgacaaacgagaacgagtcaaccgaagagaacgccgttttagaaagacctagctcgaacacctcgaacacctcgaacacctcggagaacaccttttccctggataaactggaaagaatcctcctccaatatgcgactgcccgacctagaagtgcactgggctcccacagacaacctgtcaaacggcagtctcggcatcgtcttagaggcctgagaagaggctcggcctccgagtctgaactcacagatgctgacggggccccgccaagcgtggaagcttccctggataatacaaagacgcttgcgtacaccggtggcactgcagtagaagagaacaccgactccagcgcgagtgtgaaacaaggaaaggatgccgaggcttgggtggttttcaagtccgagatcgtacgtcttgtacacactctgcagctgaagggctggcgcagggttcccgcggatttggcgtcagagattgaagtggtcaggctcagcggtgccctcacgaacgccgtgtatgtagttgcgccgcccaagaatctgcctccttcaaagaccgatagcaacagtctggtttcaaggaagcgcccaccgtaagcaacgaattccccccctcgcttggagacacatctaattggattacaggaagcttctcttgcgtatctacggtcctcaagtcgatcatctaatcgaccgagagaatgagctgcaaattcttcgtcgtctcggaaagaagaatattggcccacgcattctcggaaccttcactaatggccggttcgaagagtactttgaggctcgcccactcactcccaaggagctgcggatgcccgaaacggcaaggcaggttgccaagcggatgagagaattgcatgatggcgttgaacttcttgaagaagaacgcgaaggcggacctatgatcttcaagaactgggataaatgggtggaccgttgcgagcaagtgatgaactggctggataaagaaatcgaatcccctcaaaacgaggccaaagctgcatcggaaccatggcgtcgccgcggctatgtctgcggcgtaacgtgggacgtgttccgcagagccgtggataactaccgactttggctggttaacagctctggtggaatggccgagatcaagcgacagctagtgtttgcgcataatgatgtaagttcatctcttccaagtgcaccttcctgggaattttactgacttgtttagactcaatatggcaatctacttcgcatggagccggccacagagtcaccgctgcttttgcctgcaaatgaacataaacagctgatcgtcatcgactttgagtactcttcggccaatacacctggactcgagttcgccaaccactttgtaagtctaacccaactactaatccaaatggatgctaaccacaacagaccgagtggtgttacaattaccacgacgaagagcgctcatgggcttgcaacaaccgcaactacccaacgtcagaggagcagtaccatttcgtgtcgacctacctcacccaccgaccttccagttccggcgcacttatttcacctctatcctcgccgaccattcgcgctcgccctcctgttgcgctcgcaccgttggacttggacgagggttcggacagacccagctctcggctttcccaaaatgagcagtcgaaagaggctgaactcgacgccgaggtacgattcctcatgaagcagacccgaatgtggcgggcgatgaactccgcgcagtgggtagcttggggtatcgtccaggccaaggtgcctggcatggaagaaggtattgccgagatgcttgctgctcgcaacgggccaagcgacggcaatgacgatgacactaagacgccacctgcggtcgatatcgaagaagaagatgacggagactttgactacctggcttacgcacaggaccgagtcatgttcttctggggtgatctgctgtcactaaatctgatcaaaccagaggaactgcccgcgcctctactggagcacataaagtcgcggcttgtcacatactaggaggagaatatacgataatcttgacggagacttgttcatattatgaattacagagtggacgccagtacatagcactgcgtctatcggtgacttatcacacctacatgtatctactacacaatagcgttggggtttcaacatcatcatcgaataccatatcttgtcttatatcatttccaatcatctccagggtatctgaaatgccattgtagataagcagccaacatccaaccctacctccgcatctcaagcttcttccgcgtctccttcttcgcaccctcaacccactccccataagccttcccctccggatccttctccttaaccccgacaacccccttcaaaacctccccaataaacccaacaaaattacaccgtctgagcgtattctcccactgccatgccgccctcttcctctcctccctctccagcgtctccacatccccaatgtccctcgccctcccacgcggatcccgcacaacagccataagattaaaatgtgtttcgtcaggcgggtagcgcgcaatccgcctctgcagaacctcaataaccctctcgggaaactcagccgcgccgcacggaccatggctaataggatgcggctgcagcccatccaactcatacaacgtcccattaaccggtgtatacgcaatgaagtgataaacgtccgcacccttctcgtcgtcctgcggacgcgccgtctcgtcggcgaacgggctcgcgcgcgcaaagctattgtgcgcgctgcggatggcttccgagtttgacagcgcctcgccgcgcagctcgggcgggaaccccgttgtgaagtctttgaaggagcgcagctcgttgccgagctcgattgctggctgtggcgatgctgggtcgtcgtggttgaggattacggagaggatcgcttgcgtgccgcaggcgttttggatcgtctgcgccgcgaagaagagcttgtctgttgcggcagggtcgtaggttccgtctaggggggcttcggcgcgtgcgccggcggcttcacgcgtccatttgaaaaggaagattacgccgtagactgtgctgtttggggttagctttgtggactggttttggttgtggagtattttattgaaattgcggggcttgggaggtttgggaggtttgtgttgcttaccctagtgcccgtatcgtgtctgcgtctagagatatgagctcttcgaattgcgtgtcttttactccaagtgtttcgatcagagaggtgaagagaccctagcttgggttactatgctgctttggatggatcgtggggttgatggtacctcgtctgactcgatggtgctccagccacctacatcagccattttgactgtctgtgatggatgctaaggatgattgaatggaagatgttgtgttgtcgatatgagcgcttgaagttgctttcttccctaaatgggaatgcggttatgtcattgtcacgtgaagactgattgtgatagctcgaagtcacgtgcgtctccaccatatcacaacgatatccacagacacgttattttacagatcgagagggccatatggcagtgataattgacttttatttctgtgccttcaagggagatctactcacaaacaaacggggcctactgccggagtgtgccagcactgcggaattcgagaatgatgatttcggcgtggaaatgctacggagagaacttgacctaaagcaaaatcacatagtgcttggtcaaatggtgaatgggtagtcactctattgacgaaaccgtagacaccgagaagcaataggatgattgagccatgaaaatcccccatgtccctgcattctgttcccctagccgcgttggatcgcggagaaaagctccctcatgtttgcaagcatccctaggatgtcgtcgaattgctttccacgctgttcgggagctgtcgttggggtcagcgcccgagctgggacgatcagctcggtatagttgtctgcgcaatgaaagaatggttagagaagttagcgtccatctcagaattgagaggcctgctattacagcatgagactgaaatggactatgacgcttttgatctttctctcaagatctagagagtgagtttgaagatagcgctatcaagagaatgataaaggtgatcatctatcattcgggagtcctcgatgacagggcacaagctgattctagcaaggctcattcttgactatccccagggcggcttctaccaagtataggcttcctgtcaccaagatctgtcctcctataccaatcatcttggcatgatcaatgccatttctgacattatgtgccatataaatggtctttgtaggccaatgctccctccagaactgggcatattcttccggccatccactcggagtggcaaaatgatcgtcatattcaatcttttcgacgaatataacatgctgaatttgcatttgtagagagttccctaacgtttttagtatatctttccagtcacgcgttcgcttcggcgaaaaatgagcaaagataagaactcggacagagctgctagtccaggccattgttagattactcactggtaattccaaagggaacttacctcgtactggccacccggttataccattttgcgactactgccatacttgtctcgttgtgtgctccgtctaaataccacgtgcagccactgtaatcgataatgtcgaagcgtcctggccagcggcacttctcaataccagctaggacatcctgtccatcgagcgagtgatcacataggtagagaaacctatgagcaatttgtatagccagcgcgcagttttctagctgttcaagtggcaggtcttcaatgtgaacgtctttaacgaattcaagcaacgtccccttaacatctctgatgaattggagtgatgagcccatttctaaagcccggcgctcaatctcgctttctacctcttgatcctgcgaaactgagagtgaaagaaccccctttttaaagattccacttttatgccatgcaatatgcttcaaggtccttcctaggttttcaacgtggtccatgccaatcttcgttatggcagtgatggcaggacgatcaacgaaatttgttgcgtcgaactgaccaccatggtgggtctcgcagataacaacgtcgacgccttcttcaatgaacgtgtggaacgccaagatggccaacatctggagaaacccaggggtcttggtatcggttggcaacgcgtcagagttgagagacaggcccctgtatacttcaaagaaacgcctggcgaagagatccactggtaatggattcgaatcaattcggattctattccgaggccacagactaggcgatgtgtacagaccgatcttccgcgtaagtccatttcttttcgcatgctcacgcaagaagcagtccacataggcgcatgtgctacctttgccttttgtgccggcgacatgaatgacattcaagcgattaatattttcggactagtatccgttagtgaattccaagtgacgaaaatatcgcacatacatcatgcccaagggttagtagccagtctctcataccaaggagaggttctgaccctttcaaggtagaagcatttggggcctttgggacacttggcgacgacgatagcgtcgccgacgaatcggggaatggccgccggcactgttgaagcaatccgattgctttctaggctcgttagaactggtatcacccacgataaataagcctacttggtatgccatgtttgacgtgggtctgcctttgttctgttgagatgtgacccttgcagtcctcgggatttgctgagacagctaaagtggttcctaaggcaacaactggagctggataatttcataagcggaggtcctggcattaggtatgtgattatggcagtagtcaactatatacggagtaactagttaactacttggtgtttaaacacccaatggtcgagtgttggttgcggaatgagatcacatgacctagaattgtcgagaaattggcaggaacggatgatcctttatccgtaggcatggctgcccaacgcgaaaccctataacagacatgaaaactctcataacggctgtcaactctattacctttccgacctgagatgatcttctcggacctccggggtcttgattgattttgtagtacgtattaccatcgtgataccgttgtcaacaagcggcccttcctcaaacatatacacaagtatatacacgagttgatgggagacaatgcgttgataggggtagggagtaaacagtacccaggtttctattaggcaggccgggaaacaaagtgtgtccgcttaaaatgtaggctgtagactgtgttgggattctaccgtgtccgccacgaattcaatagtgtatgtggtgagccgtgtggcctgtcagatctttggatcaccagatggagatttagcctccggaatctagactctggatacatcgcccaaagtctgtatcaaaatcccgctttgaccgccataaaaaagcaaatccatctggccggcctcacgcagataacaacaaccacgcagcggcaagccctgagtctggagaaccatagctaattacgatagctgcggtaacatgcaggacattagtacaatccagggatattgatcgtgcgtactaatagcagcctctttgccgcggacattccattaccgtgttgtgctgcgtctgcgaattctacaaaatccagagttacctatcgccatcaacaaggcagttcacattgggttcagattccatgagctttctcgtcaaattctttgagtgtctccttcttaccaagtctatattctcgacctgctatcgcaatacctccatcgagtctttcttggggagtgagaacgtcacaccggggcaggagatagccgcggaggtagacactttcgaacgatccacataccctcgatcactggcatacaatacaccttcgaccattaagattcaacccgttctaagtggccggtcttatccttcacctcggagttctacagcttgatatcttctcctgaaggaaccgccagcgaatataactggacatcatggcttccctttctttacaagggtatgtttccacccttggtcacgattcactgtcaatgcttatagctaagtgggcagattgatggatactaccaacgcagacacaagacctacgaatccgccccgtatcataatcctaatggagtacagagggatgttagagtgttaccccgtggctcaaactttcctacttttttatgctaagatggatgatggaacttgcaagactgtgcgtattggactatgtcggatattggaaggagacagatcgtcgtgcttgctggaccgaaatataagccgccaagcgaaacacatattgccgtctgaggagtggagtttcttggaagatcgatgtacgaggaagcgacagcggctgtaagctggtcatccgaagaatataatacccaagagatttgagttttcgtaaagaaatcgaagacaagcttaaataaactatcaacttgagatggtagaaggtgggtgacgtcgatttcagcgtctacaaaaaggcgcgatttgctcatacgtttcatcgatggcattggaccctcataattcgggttcgttgtgatatatgcttacctactccgaagagatgactagaactgggtgtcggtcgccattttagaggaacagaatcataacagtacagatgaccctatcatgctgccgagcctccatcttcaagcttaaccacggcaacgtccgtgtgtgtgagttccatgattggtttgtcaattaccctgccaggcagggaacctgtgagcagtaacagtcataaatttggagcccaaagcattttgaacaaggacacctgaggataaacgcattaactctgctttgagatttataccagagcttaaagggaagagcaaagagcatcacaatttcattaagtaatgttgaatgacctgctaatgtttgtcctgtttgataggcttcattcaactaaatcacactctcctctcttacttctcacagcaccatcacttggctggtcacagcaatacctctctgctatgatccacggccacaccggcactacactgtttgactagtgctaccgcgactgcctttaaaatcaatctcagctatgccactgctacattctagattcctagtcatattgagcaacgacagtaccgtctcttgaatcatccccagcctcttcactgcttcataccctcccacgctatatcaaccacactctcgccacactactaccagctcttctgccgcactcgatcaactacattatcgccaggatgggccggagtacccgagggtgcggagagtgcggagggtgccgccagcaaaaatatcattgccctagagattgtggctaaagagctcttcttccagctcaaagcctcagtgaggatgttcgtgggcaaccgaatcgaccgacatgcgctcgagaaaacaaccgacaaactagaggacaagagcaaacaagacaagagcgtccggatttcagaaatgagcttggaggacgtggaacagtgcctaggcatgatatggagatgaaggacgtgcagtcgctagagtctagaggtggctcaggtgacgcagatcagacgccgaagaaaagaatcgaaataatgaagcaaatatgctctatctacgtcaaccctcgtctcgagctaggagcgacaaatacacccgggaatcaagtgaaaaagaaatgaagtgagagtgagagcgaaatgagagtggactcttttttgggtcgattttatgttgttatttttttctcactctctcttttttcttgtgagtccagagaaagattgcctcaaaaaatggttggggttcacattggccagtcaactcaatctctacctcgagtggcccagaaaattttctcaagagagggaaatatggcgctagtcctacggttgaagggaacggtataaccctaccattcattctacgacatcttactagacacactaggacaaggcggagcggatttcgtgttgacatcccagatgctattgcatgatttggcggaacgtgtctggattacacttgataaggccaagaaggtcaaggtcccgaaggaaaatgcccatcaacgttaaaaaaatgggcgtctgtgccaacgatggcatattgtctatgaaattgtggtgcttttctctgtcggtcacatggaatgggataaggagcaaacgcatatgatcacaatctggcagcttcgagccagtcatctagtggtcatgtttcatacattcctgtgatgactgctgataccactccctcgtctatccgattgacgcgatcctcagacgcctcatcgcccaagccgtgctagccatccctgacaaccttaggttgccgagggtccgcgactgcgaaagctattcaaacgacaggaccgtcttatttggtgtggtcgatgccggagagtgatagagctcagcaatccctgtacgaaaagtacgaaaacggacagctatcatatttgggcccagcgaggaagaagaagcagaccgaaagaaacgaatcacacaaaagacatcgagccaggttattaagaagtctctggtttcacgagttgcaagttctacccatcccattgtgttatttctctggacatcttttctttgatcaccaaatatctccaacaagaatggcccacgacaaaatacacagatatcattgaccctggagctatacacgaccatttttatcctcggcgccaggtcaatggcatatgggagataaattattctccttattactttgtacgcattcttagatcacagtctctgtgacgatctaagaacatgcaatccaaacgcacttccgatgtctgtaccttccactcgtcgaggaagtcgcgccttcctcgaacgtaaatgagaagtatcatttgcatagtttgcaggcagagcaaatagttttcctttctctccttgtacttagtatttggtcgaaaatgcactcattctctgaactgatctagcacgtaacattctcgttctctagtccgacctctccaagctctacaacttcaccaactcaaaatatctcccccctagctccattgactctaattgcgtcccctgttccacaatgttaccttcatgcaacactataagcgtaagttagtctctgcattgtaaacagaatcgatatttgtttcttaccgtaaatacaatcggccttctgtaccgtgcttatccgatgcgcaacggcgaccgtcgttcggccttgagccgccgcattcagtgcatcctggacgaccttttcagactccgaatcgagcgcggaagtcgcctcatctaggaggaggatacgtggatcacgaagaagcgctcgcgcaatggctatttgttgttgctgtccgccagagagcatgccgcccctcgctcctatcaccgtcgagaagccgtcactgagctgggcgttagtagatatttactttaggtcagaaatagaaaagcagagccggagggtgcaagggaaaggggtggcttacggtagagatgagatgaagtcgtagatattggcatccttgcatgctttgatgattttctcctcggaaccatcctcgtcgttggttcccagggtgatattctccctaatggttcctttgtatagcgtcggctcttgaataaccagagcaaggtggctcctgtagctcttgagattcaatctagaaatgtctttcccatcaaccaatgtttgacccgcttcaggatcaaagaaccgctccagcaaagcaatgatggtgctcttcccacatccactcgctcccactagacctgtgtattggcccggttgaatactcaagctcaagccgctaataaccaccctctccggtctgttggggtatcggaaataaatatttcgcaactccaagctgccttccatattcgttaacagctcgccggtttcctggcgggcgtcaatattgacaggccggtccaataacgttttaatatcctgggccccctggcgagacttgctcatatcaggcgcgaaggagaaaatagccccggcgctgaatgcgcctacgacgatagccgcataagcgatgaagaactgcaccatagaatagccttcatggattatgagacttcctccataccagaaagccagcgcgatacatagaaaattggccgactgtgaggctgcatagagcgctgatgacttgagtgttgaaaccaccgatttctgtcgctgagcttccaatatgttgtgatactctcgctgtgcatggctttcaagatttagcgatgcaaccgtcttgatggcagaacttgcctcacatgcataagttcctgaagctgtatatgccgccttcgactatcgagccatttccccgaggatcttgagtcggacgagaccacaagtaagaacaactggaatggttgcggtacaaaccagtcccagcttccaacctatcgcaatcgatacagccacgccagcaatcaaagtcgttgagacaatgaagatggagcctaaaatcacaccactcattccggcaaggttggtagcatccgtggacaacgaggatgtaagtgaaccggctgagaacttggctttgtcgaacatggaaatatcctgatagagcactcggagcagtaggcaaaacagagacccgatgctccccagcccaagaatgcagtacagcccagcatcagatacatcacactccagaagttgacattatgacgtagcttttcatgcatatcaggcggcaacgacattgccgcgattttcttgccgtagaacacggcctgtctacggaatggtcagtatcgatattctgcacagcgtgggaatagagtctagcgtgggatttccagcgcctgtgatgattgaaaataacagaccccagaccatggttagcgtttcttccttgttgaagttggcgacaaacttgatcagctcccataaggagtatttgtagtcggtctcttgctcggaatctctcccgcggtcttcggttccccgggtgctgctctacctcgtacgtatatattttagactctttgccctcgtcttttaggtcagaagctcagggtctgcttcgagggcagactttgcgtcgctgattacgatactcctttcggtcgacatgcgctgcttctccactaactcgtaatacatcgatcgtttctcaagtaggtcgttgtgggttcctggctcgacaacacgtccgtgagacataacaacaatattttctgcctcagtgatagtagataatctgaataatagtcaatttctgtctctaacactaatcgaacacataccggtgactgattgtgattgttgtccggccttccgcagcaacatcaagcgccgcctgtaccaaccgctcggcctgggcatctagagctgaagtagcctcatccagtagcaagacctttggattgctgataatagcccgtgcaatggccactcgctgtttttgtccacctgaaagtaatgagcctctttcgccaacatcagtatcgaatccatccggcaaggcggagataaattcaaaacagttcgctttctttgcggggtcaaacacaagcttttctattacagcgtgaagggagttttcgtgtccagtacctatcagaccaaacctgatattttcgaatactgtcgtggcaaagagagtgagctgttgcgtaacgatcgcgacttgttggcgtaaccattgtaaatttagagacgtgatatcgtggccatcgagcactatggtgatctcattagcacggttcattcttcacaagaaaaagcctcacatatctcgccacttattggttcataaaacctctcaatcagacccgccaatgtacttttcccacagccagaagcaccaacgatggcggtcgtctttccagctgtgttaggactagctaccagcgtatcctgaaaatggaggtt
